(19) United States
(12) Patent Application Publication
(10) Pub. No.: US 2026/0026509 A1
(43) Pub. Date: Jan. 29, 2026

(54) BIOLOGICAL PLANT PROTECTION AGENT, METHODS AND USES THEREOF

(71) Applicant: INNOVPLANTPROTECT – ASSOCIAÇÃO, ELVAS (PT)

(72) Inventors: Cristina Maria LOURENÇO DA CUNHA CORREIA DE AZEVEDO, ELVAS (PT); Margarida BASALOCO FONSECA, ELVAS (PT); Pedro CARRANCA NUNES ROSA, ELVAS (PT); Tiago Miguel MARQUES MONTEIRO AMARO, ELVAS (PT); Fátima Alexandra MEIRA MACHADO, ELVAS (PT); David Alexander LEARMONTH, ELVAS (PT)

(73) Assignee: INNOVPLANTPROTECT – ASSOCIAÇÃO, ELVAS (PT)

(21) Appl. No.: 18/995,526

(22) PCT Filed: Jul. 21, 2023
(86) PCT No.: PCT/IB2023/057464

§ 371 Date: Jan. 16, 2025

(30) Foreign Application Priority Data
Jul. 21, 2022 (PT) 118117
Jul. 20, 2023 (PT) 118827

(51) Int. Cl. A01N 63/22; A01P 1/00; A01P 3/00; C12N 1/20; C12R 1/07

(52) U.S. Cl. CPC A01N 63/22; A01P 1/00; A01P 3/00; C12N 1/205; C12R 2001/07

(57) ABSTRACT

The present disclosure relates to a Bacillus velezensis strain, and a composition for plant protection comprising an effective amount of said Bacillus velezensis. The disclosed Bacillus velezensis strain or composition can be used as a biological plant protection agent. A method for protecting or treating plants and/or fruit from fungal or bacterial infections comprising applying an effective amount of the Bacillus velezensis strain or the composition is also disclosed.

### TECHNICAL FIELD

[0001] The present disclosure relates to the field of biological plant protection agents (henceforth termed BPPAs), more specifically to a strain of Bacillus velezensis (henceforth termed B. velezensis), its formulations, uses and methods for the control of plant diseases, in particular fire blight in fruit plants, pome fruits and ornamental plants, or rice-blast.

### BACKGROUND

[0002] Agriculture involves cultivation of plants for food, biofuels and raw materials. Crops are endangered by pests and diseases which can drastically reduce harvest yields. Pesticides are substances that are able to repel, eradicate or mitigate pests and diseases. According to the Food and Agriculture Organisation of the United Nations, four million tonnes of chemical-based pesticides were used globally in 2018, causing negative impact on soil, air and water quality as well as affecting non-target organisms.

[0003] Fire blight is a particularly devastating systemic necrotic plant disease affecting apple and pear trees as well as many other plant members of the Rosaceae family. Disease symptoms on the plant are characterised by scorched appearance, necrosis and wilting and bacterial ooze. Fire blight is caused by the pathogen Erwinia amylovora (henceforth termed E. amylovora), a facultative anaerobe and non-sporulating, rod-shaped Gram-negative bacterium that belongs to the Enterobacteriaceae family. Fire blight is believed to have originated in North America in the late 18th century but has since spread worldwide as it is readily transmitted by wind, insects, rain, pruning and asymptomatic host plants. Primary infection typically occurs in the epiphytic phase in flowers, in which the pathogen begins to multiply and enters into contact with wounds or natural openings like stomata. Eventually, colonised tissues in trunks or branches evolve to overwintering cankers. Once fire blight is established in the plant, immediate action is required to segregate the infected portion of the plant by extensive pruning. Delay or failure to prune in a timely manner is usually fateful, culminating in the forced destruction of entire orchards. Strains of Erwinia amylovora are also some of the most prevalent bacterial agents responsible for spoilage of fresh fruit and vegetables post-harvest. This dual attack on both plants and post-harvested fruit creates massive economic losses as well as the need for large scale destruction of millions of plants and tonnes of wasted food.

[0004] Currently, control of fire blight remains extremely challenging as there are limited commercially available solutions with antagonist properties that directly affect the pathogen responsible. Excessive use of copper salts, aluminium phosphates and chemical-based pesticides is commonplace, but outcomes are unsatisfactory and such treatments lead to pesticide accumulation over time resulting in potentially toxic levels in soils.

[0005] Furthermore, another important aspect in fire blight disease management is related to the development of microbial resistance, leading to the appearance and spread of even more potent E. amylovora strains that fail to respond to powerful antibiotics, such as streptomycin or tetracycline, whose use is permitted in some regions worldwide.

[0006] This evidence, taken together, clearly indicates that there exists a pressing urgency across the globe for efficacious, environmentally benign, sustainable, and economically viable solutions to control fire blight disease caused by E. amylovora.

[0007] Consequently, several BPPAs have emerged in the patent literature that are claimed to be able to control E. amylovora. Among these BPPAs are phages (Mazzuchi, 2014), essential oils (Mullen, 2011) and recombinant peptides (Gupta, 2021). The most prevalent class though are purified single bacterial strains, such as, for example, Lactobacillus plantarum (Umemura, 2022), Erwinia herbicola (Pusey, 1999), Pantonea agglomerans (Dagher, 2022), Pseudomonas fluorescens (Armstrong, 2010), Bacillus subtilis (Heins, 2000) or even multi-bacterial strain concoctions (Brower, 2011).

[0008] However, to date, no cure or truly efficacious standalone BPPA with target specificity for E. amylovora has become available for widespread use by the agricultural community.

[0009] Another disease of concern is rice blast in rice plants. Rice is a major staple food crop for more than 3.5 billion people around the globe and provides 20% of all the calories consumed by the world population (Elert, 2014). The worldwide population is expected to grow up to 9.8 billion by the end of 2050 and thus food demand will greatly increase, wherein rice crops will certainly be a key player. Rice growers though will face a huge challenge to increase rice yield by 25% to ensure food availability (Skamnioti, 2009). On the other hand, it is estimated that crop losses due to rice blast disease deprives 60 million people of food (Pennisi, 2010).

[0010] Rice blast is caused by the filamentous fungus Magnaporthe oryzae (anamorph Pyricularia oryzae, henceforth referred to as M. orzyae), a plant pathogenic fungus. The pathogen infects as a spore that produces lesions or spots on parts of the rice plant such as the leaf, leaf collar, panicle, culm and culm nodes. Using a structure called an appressorium, the pathogen is able to penetrate the plant tissues. Initial symptoms are white to grey-green lesions or spots with darker borders produced on all parts of the shoot, while older lesions are elliptical or spindle-shaped and whitish to gray with necrotic borders. Lesions may enlarge and coalesce to kill the entire leaf and panicles followed by significant crop loss in total production. Symptoms are observed on all above-ground parts of the plant.

[0011] Currently employed chemical-based fungicides against M. orzyae are generally ineffective due in part to the fungus acquired resistance and are also environmentally toxic and to date, no cure or truly efficacious standalone sustainable bioprotectant with target specificity against M. orzyae has become available for widespread use by the agricultural community.

[0012] These facts are disclosed in order to illustrate the technical problem addressed by the present disclosure.

### General Description

[0013] The present disclosure relates to the field of BPPAs, more specifically to a new strain of B. velezensis, its formulations, uses and methods for the control of plant diseases, in particular fire blight in fruit plants, pome fruits and ornamental plants, or rice blast in rice plants.

[0014] Several B. velezensis strains have been reported to suppress the growth of pathogens, including bacteria, fungi and nematodes. Genomic analysis revealed that B. velezensis possesses strain-specific clusters of genes related to the biosynthesis of certain secondary metabolites, which play significant roles in both pathogen suppression and plant growth promotion. B. velezensis is capable of the biosynthesis of complex metabolites including cyclic lipopeptides such as surfactin, bacillomycin-D, fengycin and bacillibactin, as well as polyketides such as macrolactin, bacillaene and difficidin (Chen, 2007).

[0015] Indeed, several strains of B. velezensis have been recently proposed as ecologically safe BPPAs as well as plant growth promoters (Fan, 2018, Reva, 2019, Joly, 2021, Alenezi, 2021, Gharsa, 2021, Myo, 2021, Shin, 2021, Kim, 2021, Wang, 2022).

[0016] In particular, the present disclosure relates to an isolated B. velezensis strain, with the deposit with number CECT30902 received on 12 Jul. 2023 at the Spanish Type Culture Collection (CECT) (henceforth termed ‘I21’ or ‘InPP (I21)’) that has proven to be surprisingly efficacious against the causal agent of fire blight, E. amylovora in comparison to more than 200 bacterial endophytes isolated from different plant species (namely pear, almond, olive amongst others) that were also screened but found ineffective, as well as a commercial BPPA containing another Bacillus strain, namely Bacillus subtilis QST 713 (Serenade ASO®), henceforth also termed ‘Commercial (I16)’. The 21 strain was isolated from pear plants of the Rocha variety from an orchard located in the Oeste region of Portugal. The I21 strain was selected for further testing based on its unexpectedly strong in vitro growth inhibition of a virulent E. amylovora strain (isolated from Pyrus communis cv. ‘Rocha’ from Campo Maior region in Portugal, that is henceforth termed ‘CM1’).

[0017] To genetically characterise 121, the genomic sequence of three genes were amplified and sequenced with the following primers: (1) SEQ ID No 21-16S rRNA partial sequence-16SFw AGAGTTTGATC(A:C)TGGCTCAG and SEQ ID No 22-16SRev TACGG(C:T)TACCTTGTTACGACTT (Jensen, 2002); (2) SEQ ID No 23-beta subunit of RNA polymerase (rpoB) partial sequence-rpoBFw, GACGTGGGATGGCTACAACT and SEQ ID No 24-rpoBRev, ATTGTCGCCTTTAACGATGG (Rooney, 2009); and (3) SEQ ID No 25-gyrase A (gyrA) partial sequence-gyrAFw, CAGTCAGGAAATGCGTACGTCCTT and SEQ ID No 26-gyrARev, CAAGGTAATGCTCCAGGCATTGCT (Rooney, 2009). The sequences obtained were the following:

I21 16S rRNA partial gene
SEQ ID No. 27:
ccattctgtcaccattcggcggctggctcataaaggttacctcaccgact
tcgggtgttacaaactctcgtggtgtgacgggcggtgtgtacaaggcccg
ggaacgtattcaccgcggcatgctgatccgcgattactagcgattccagc
ttcacgcagtcgagttgcagactgcgatccgaactgagaacagatttgtg
ggattggcttaacctcgcggtttcgctgccctttgttctgtccattgtag
cacgtgtgtagcccaggtcataaggggcatgatgatttgacgtcatcccc
accttcctccggtttgtcaccggcagtcaccttagagtgcccaactgaat
gctggcaactaagatcaagggttgcgctcgttgcgggacttaacccaaca
tctcacgacacgagctgacgacaaccatgcaccacctgtcactctgcccc
cgaaggggacgtcctatctctaggattgtcagaggatgtcaagacctggt
aaggttcttcgcgttgcttcgaattaaaccacatgctccaccgcttgtgc
gggcccccgtcaattcctttgagtttcagtcttgcgaccgtactccccag
gcggagtgcttaatgcgttagctgcagcactaaggggcggaaacccccta
acacttagcactcatcgtttacggcgtggactaccagggtatctaatcct
gttcgctccccacgctttcgctcctcagcgtcagttacagaccagagagt
cgccttcgccactggtgttcctccacatctctacgcatttcaccgctaca
cgtggaattccactctcctcttctgcactcaagttccccagtttccaatg
accctccccggttgagccgggggctttcacatcagacttaagaaaccgcc
tgcgagccctttacgcccaataattccggacaacgcttgccacctacgta
ttaccgcggctgctggcacgtagttagccgtggctttctggttaggtacc
gtcaaggtgccgccctatttgaacggcacttgttcttccctaacaacaga
gctttacgatccgaaaaccttcatcactcacgcggcgttgctccgtcaga
ctttcgtccattgcgganaattccctactgctgcctcccgtaggagtctg
ggccgggtctcagtcccatg
I21 rpoB partial gene
SEQ ID No. 28:
Tgacgccttgtgaagatgatgtatacacatctattcacattgaagaatat
gaatcagaagcacgtgatacaaagcttgggcctgaagagatcacccgcga
tattccaaacgtaggggaagacgcgcttcgcaatcttgatgaccgcggaa
ttatccgtatcggtgcggaagtcaacgacggagaccttctcgtaggtaaa
gtaacgcctaaaggtgtaactgagcttacggctgaagaacgccttctgca
tgcgatctttggagaaaaagcgcgtgaagtccgtgatacttctctccgtg
tgcctcacggcggcggcggaattatccacgacgtaaaagtcttcaaccgt
gaagacggcgacgaacttcctccgggagtgaaccagcttgtacgcgtata
tatcgttcagaaacgtaagatttctgaaggtgataaaatggccggacgtc
acggaaacaaaggggttatctcgaagattcttcctgaagaagatatgcct
taccttcctgacggcacgccgatcgatatcatgcttaacccgctgggtgt
accatcacgtatgaatatcggtcaggtattagaacttcacatgggtatgg
ctgcccgctacctcggcattcacatcgcgtcacctgtatttgacggcgcg
cgtgaagaagatgtgtgggaaacacttgaagaagcaggcatgtcaagaga
cgctaaaacagttctttatgacggccgtacgggagaaccgtttgacaacc
gtgtatctgtcggaatcatgtacatgatcaaactggcgcacatggttgat
gataaacttcatgcccgttctacaggtccttactcacttgttacgcagca
gcctctcggcggtaaagcccaattcggcggacagcgtttcggtgagatgg
aggtttgggcgctcgaagcttacggcgcagcttacacgcttcaagaaatc
ctgactgtgaagtccgatgacgtggtcggacgtgtgaaaacatatgaagc
ctcgtataagggggaaacaataaagg.
I21 gyrA partial gene
SEQ ID No. 29:
atcccgggcgcttccggatgtgcgtgacggtgtgaggccggttcccttga
gattttgtacgcaatgaatgatttaggcatgaccagtgacaaaccatata
aaaaatctgcccgtatcgtcggtgaagttatcggtaagtaccacccgcac
ggtgactcagcggtttacgaatcaatggtcagaatggcgcaggattttaa
ctaccgctacatgcttgttgacggacacggcaacttcggttcggttgacg
gcgactcagcggccgcgatgcgttacacagaagcgagaatgtcaaaaatc
gcaatggaaatcctccgggacattacgaaagatacgattgattatcaaga
taactatgacggcgcagaaagagaacctgtcgtcatgccttcgagatttc
cgaatctgctcgtaaacggagctgccggtattgcggtcggaatggcgaca
aatattcctccgcatcagcttggggaagtcattgaaggcgtgcttgccgt
aagtgagaatcctgagattacaaaccaggagctgatggaatacatcccgg
gcccggattttccgactgcaggtcagattttgggccggagcggcatccgc
aaggcatatgaatccggacggggatccattacgatccgggctaaggctga
aatcgaagagacatcatcgggaaaagaaagaattattgtcacagaacttc
cttatcaggtgaacaaagcgagattaattgaaaaaatcgcagatcttgtc
cgggacaaaaaaatcgaaggaattaccgatctgcgtgacgaatccgaccg
taacggaatgagaatcgtcattgagatccgccgtgacgccaatgctcacg
tcattttgaataacctgtacaaacaaacggccctgcagacgtctttcgga
atcaacctgctggcgctcgttgacggacagccgaaggtactaagcctgaa
gcaatgcctggagccattaccttgaa.

[0018] In an embodiment, phylogenetic analysis of the rpoB and gyrA gene sequences enabled a more detailed identification of 121, with high homology to Bacillus velezensis strain ZeaDK315Endobac16 for these two genes, having the GenBank accession number CP043809.1. Whole-genome sequencing of I21 (SEQ ID No. 30 to SEQ ID No. 48), followed by genome based taxonomic assignment, confirmed the strain to be a B. velezensis. A phylogenomic tree of B. velezensis, further confirmed the close relationship of I21 to ZeaDK315Endobac16.

[0019] Surprisingly, the whole-genome sequencing of strain I21, disclosed in the present document, allowed to conclude that this strain carries 21 genes (with 20 unique DNA sequences) that are unique to it (SEQ ID No. 49 to SEQ ID No. 68), relative to a collection of 489 B. velezensis genomes.

[0020] An aspect of the present disclosure relates to Bacillus velezensis strain with the deposit number CECT30902 received on 12 Jul. 2023 at the Spanish Type Culture Collection (CECT)-International Depositary Authority under the Budapest Treaty, at Colección Espanola de Cultivos Tipo.

[0021] Another aspect of the present disclosure relates to a Bacillus velezensis strain wherein the B. velezensis strain comprises the following genes SEQ ID No. 49 to SEQ ID No. 68.

[0022] Another aspect of the present disclosure relates to a Bacillus velezensis strain with a genome comprising the sequence of SEQ ID No. 30 to SEQ ID No. 48.

[0023] Another aspect of the present disclosure relates to the Bacillus velezensis of the present disclosure obtained by genetic engineering. The provided genome sequences, as well as the further characterization of the I21 strain, allow the person skilled in the art to manufacture and reproduce the strain of bacterium by utilizing synthetic biology methods, and to further verify the obtained strain. Indeed, it is known from the state of the art that it is possible to (1) use a closely related reference genome or genome collection to infer the order (scaffold) of the genome contigs (SEQ ID No. 30 to SEQ ID No. 48) (Alonge et al., 2019) (2) synthetically recreate the full genome of a new bacterium, (3) extract the natural genomic material from an existing strain of bacterium, (4) transplant into the existing bacterium (now void of its natural genome) with the synthetically created new bacterial genome, and (5) successfully culture colonies of the bacterium with the newly created synthetic genome (Pennisi, 2010 and Gibson et al., 2010).

[0024] Another aspect of the present disclosure relates to a Bacillus velezensis stain wherein the B. velezensis produces the proteins from the following list: SEQ ID No. 1, SEQ ID No. 2, SEQ ID No. 3, SEQ ID No. 4, SEQ ID No. 5, SEQ ID No. 6, SEQ ID No. 7, SEQ ID No. 8, SEQ ID No. 9, SEQ ID No. 10, SEQ ID No. 11, SEQ ID No. 12, SEQ ID No. 13, SEQ ID No. 14, SEQ ID No. 15, SEQ ID No. 16, SEQ ID No. 17, SEQ ID No. 18, SEQ ID No. 19, and SEQ ID No. 20.

[0025] In an embodiment for better results, the Bacillus velezensis of the present disclosure may be used for controlling plant or fruit diseases.

[0026] In an embodiment for better results, the Bacillus velezensis of the present disclosure may be used as a biological plant or fruit protector.

[0027] In an embodiment for better results, the disease is an infection, in particular a fungal and/or a bacterial infection.

[0028] In an embodiment for better results, the bacterial infection is caused by a gram-negative bacteria; in particular a bacteria of the genus Enterobacterales.

[0029] In an embodiment for better results, the plant is a woody plant; namely plants of the Rosaceae family.

[0030] In an embodiment for better results, the disease is caused by an Erwinia infection; in particular Erwinia amylovora.

[0031] In an embodiment for better results, the plant is rice.

[0032] In an embodiment for better results, the disease is a rice blast.

[0033] In an embodiment for better results, the disease is caused by a M. orzyae infection.

[0034] Another aspect of the present disclosure relates to a composition for plant protection comprising an effective amount of the Bacillus velezensis described in the present disclosure, and a suitable additive.

[0035] In an embodiment for better results, the suitable additive is selected from a list consisting of: a carrier, a solvent, a buffer, an oil, a stabiliser, a preservative, an excipient, a surfactant, an emulsifier, an adhesion agent, an emulsifier, osmoprotectant, sun protectant, wetting agent, or mixtures thereof.

[0036] In an embodiment for better results, the carrier is alginate, chitosan, ulvan, fucoidan, carrageenan, xanthan gum, gellan gum, gelatin, arabic gum, lignin, maltodextrin, zein, protamine sulphate, lecithin, gelatin matrices, methacrylate-modified lignin, methacrylated gellan gum, polyvinyl alcohol, low density polyethylene, poly(ε-caprolactone), polyethylene glycol or poly(lactic-co-glycolic acid), or combinations thereof; preferably alginate.

[0037] In an embodiment for better results, the composition may further comprise an agriculturally acceptable compound; preferably agriculturally acceptable compound is selected from: plant strengtheners, growth promoters, nutrients, fertilisers, vitamins, minerals; or mixtures thereof.

[0038] In an embodiment for better results, the composition may further comprise a biological plant protector agent; such as an essential oil.

[0039] In an embodiment for better results, the composition comprises an effective amount of B. velezensis strain in the composition in the composition ranges from 1.0×10³ CFU/mL to 1.0×10¹¹ CFU/mL, preferably from 1.0×10⁵ CFU/mL to 1.0×10¹⁰ CFU/mL; more preferably from 1.0×10⁶ CFU/mL to 1.0×10⁹ CFU/mL.

[0040] In an embodiment for better results, the composition is in the form of wettable powders, granules, flowables, microencapsulations or nanoencapsulations.

[0041] Another aspect of the present disclosure relates to a composition comprising a mixture of proteins in an effective amount, wherein the proteins are 95% identical to the following list: SEQ ID No. 1, SEQ ID No. 2, SEQ ID No. 3, SEQ ID No. 4, SEQ ID No. 5, SEQ ID No. 6, SEQ ID No. 7, SEQ ID No. 8, SEQ ID No. 9, SEQ ID No. 10, SEQ ID No. 11, SEQ ID No. 12, SEQ ID No. 13, SEQ ID No. 14, SEQ ID No. 15, SEQ ID No. 16, SEQ ID No. 17, SEQ ID No. 18, SEQ ID No. 19, and SEQ ID No. 20; preferably with a suitable additive, the additive may be any of the described additives

[0042] In an embodiment the composition comprises one protein, two proteins or three proteins, wherein the protein is 95% identical to a protein of following list: SEQ ID No. 1, SEQ ID No. 2, SEQ ID No. 3, SEQ ID No. 4, SEQ ID No. 5, SEQ ID No. 6, SEQ ID No. 7, SEQ ID No. 8, SEQ ID No. 9, SEQ ID No. 10, SEQ ID No. 11, SEQ ID No. 12, SEQ ID No. 13, SEQ ID No. 14, SEQ ID No. 15, SEQ ID No. 16, SEQ ID No. 17, SEQ ID No. 18, SEQ ID No. 19, or SEQ ID No. 20.

[0043] In an embodiment for better results, the mixtures of proteins consists in a mixture 95% identical to the following list: SEQ ID No. 1, SEQ ID No. 2, SEQ ID No. 3, SEQ ID No. 4, SEQ ID No. 5, SEQ ID No. 6, SEQ ID No. 7, SEQ ID No. 8, SEQ ID No. 9, SEQ ID No. 10, SEQ ID No. 11, SEQ ID No. 12, SEQ ID No. 13, SEQ ID No. 14, SEQ ID No. 15, SEQ ID No. 16, SEQ ID No. 17, SEQ ID No. 18, SEQ ID No. 19, and SEQ ID No. 20.

[0044] Another aspect of the present disclosure relates to the Bacillus velezensis strain described in the present disclosure or to the composition described in the present disclosure as a biological plant protection agent.

[0045] A method for protecting or treating plants and/or fruit from fungal or bacterial infections comprising applying an effective amount of the Bacillus velezensis strain or the composition described in the present disclosure.

### BRIEF DESCRIPTION OF THE DRAWINGS

[0046] The following figures provide preferred embodiments for illustrating the disclosure and should not be seen as limiting the scope of invention.

[0047] FIG. 1: Embodiment of the phylogenomic tree of B. velezensis, highlighting the placement of strain I21.

[0048] FIG. 2: Embodiment of the in vitro inhibition of E. amylovora (CM1) growth by the disclosed I21 B. velezensis by dual-plate solid and liquid assays. A: Inhibition halo of E. amylovora (CM1) growth when grown together with the Commercial (I16) strain (left panel) and I21 B. velezensis (right panel) in solid Luria-Bertani (LB) media; B: Quantification of data presented in panel A (n=3, with 3 replica per experiment); C: Inhibition of E. amylovora (CM1-GFP) when grown together with different I21 B. velezensis OD₆₀₀ as measured by fluorescence emission in liquid LB media.

[0049] FIG. 3: Embodiment of the dual-plate inhibition assay of two E. amylovora reference strains with Commercial (I16) and I21. A: Inhibition of E. amylovora CFBP 1430 by Commercial I16 (Serenade ASO; left panel) and I21 (right panel); B: Inhibition of E. amylovora Ea273 (ATCC 49946) by Commercial I16 (Serenade ASO; left panel) and I21 (right panel).

[0050] FIG. 4: Embodiment of an antibiogram of E. amylovora strains with Streptomycin. A: E. amylovora CFBP 1430; B: E. amylovora Ea273 (ATCC 49946); C: E. amylovora CM1; D: Schematic representation of the antibiogram layout (streptomycin concentrations from 0 to 2500 μg/ml on antibiotic discs in LB media).

[0051] FIG. 5: Embodiment of indole-acetic-acid (IAA) production by I21 B. velezensis strain and Commercial I16 (Serenade ASO).

[0052] FIG. 6: Embodiment of 1-Aminocyclopropane-1-carboxylic acid (ACC) deaminase activity of I21 B. velezensis strain and Commercial I16 (Serenade ASO).

[0053] FIG. 7: Embodiment of catalase activity of B. velezensis strain I21 and Commercial I16 (Serenade ASO).

[0054] FIG. 8: Embodiment of the effect of I21 treatment in reducing the infection symptoms caused by E. amylovora CM1-GFP in detached pears from the Rocha variety; A: Phenotype in intact control pears treated with PBS and infected with CM1-GFP 24 hours later; A′: Phenotype in cut pears treated as in Panel A; A″: Spread of E. amylovora CM1-GFP fluorescence in pears as in Panel A; B: Phenotype of pears treated with I21 and infected with CM1-GFP 24 hours later; B′: Phenotype in cut pears treated as in Panel B; B″: Spread of E. amylovora CM1-GFP fluorescence in pears treated as in Panel B; C: Phenotype of pears treated Commercial I16 (Serenade ASO, Bayer) and infected with CM1-GFP 24 hours later; C′: Phenotype in cut pears treated as in Panel C; C′: Spread of E. amylovora CM1-GFP fluorescence in pears treated as in Panel C.

[0055] FIG. 9: Embodiment of the effect of I21 treatment in reducing the infection symptoms caused by E. amylovora CM1-GFP in detached pears from the Rocha variety. A: Phenotype in intact control pears treated with PBS and infected with CM1-GFP 24 hours later; A′: Phenotype in cut pears treated as in Panel A; A″: Spread of E. amylovora CM1-GFP fluorescence in pears as in Panel A; B: Phenotype of pears treated with I21 and infected with CM1-GFP 24 hours later; B′: Phenotype in cut pears treated as in Panel B; B″: Spread of E. amylovora CM1-GFP fluorescence in pears treated as in Panel B. C: Quantification of I21 effect on fire blight disease progression by means of reduction of CM1-GFP expression. Percentage of inhibition was calculated as follows: 100−[(100×Mean fluorescence of Panel B″)/Mean fluorescence of A″]. Mean fluorescence as measured with ImageJ. Each experiment was performed 4 times with 6 immature pears each. The analysis was performed on 3 images per pear corresponding to each inoculation whole (6 pears×3 wholes=24 images/per treatment/experiment).

[0056] FIG. 10A: Embodiment of in vitro I21 B. velezensis efficacy studies at optical density (OD)=0.6. From left to right: Naked I21-I21 B. velezensis only; Formulation without I21-control sample of alginate containing solution; Formulated I21-I21 strain mixed in an alginate-containing solution; Empty MPs-empty alginate microparticles, used as control; I21 loaded MPs-alginate microparticles loaded with I21 B. velezensis.

[0057] FIG. 10B: Embodiment of in vitro I21 B. velezensis efficacy studies at OD=1.0. From left to right: Naked I21-I21 B. velezensis only; Formulated 121.

[0058] FIG. 11: Embodiment of viability of naked and formulated I21 B. velezensis over time.

[0059] FIG. 12: Embodiment of the effect of I21-loaded microparticles treatment in reducing the infection symptoms caused by E. amylovora CM1-GFP in detached pears from the Rocha variety. A: Phenotype in intact control pears treated with empty microcapsules and infected with CM1-GFP 24 hours later; A′: Phenotype in cut pears treated as in Panel A; A″: Spread of E. amylovora CM1-GFP fluorescence in pears treated as in Panel A; B: Phenotype of pears treated with I21 loaded microparticles and infected with CM1-GFP 24 hours later; B′: Phenotype in cut pears treated as in Panel B; B″: Spread of E. amylovora CM1-GFP fluorescence in pears treated as in Panel B. C: Quantification of the I21-loaded microparticles effect on fire blight disease progression by means of reduction of CM1-GFP expression. Percentage of inhibition was calculated as follows: 100−[(100×Mean fluorescence of Panel B″)/Mean fluorescence of A″]. Mean fluorescence as measured with ImageJ. Each experiment was performed 2 times with 6 immature pears each. The analysis was performed on 3 images per pear corresponding to each inoculation whole (6 pears×3 wholes=24 images/per treatment/experiment).

[0060] FIG. 13: Embodiment of the effect of Formulated I21 treatment in reducing the infection symptoms caused by E. amylovora CM1-GFP in detached pears from the Rocha variety. A: Phenotype in intact control pears treated with formulation mixture control and infected with CM1-GFP 24 hours later; A′: Phenotype in cut pears treated as in Panel A; A″: Spread of E. amylovora CM1-GFP fluorescence in pears treated as in Panel A; B: Phenotype of pears treated with formulated I21 and infected with CM1-GFP 24 hours later; B′: Phenotype in cut pears treated as in Panel B; B″: Spread of E. amylovora CM1-GFP fluorescence in pears treated as in Panel B; C: Quantification of the formulated I21 effect on fire blight disease progression by means of reduction of CM1-GFP expression. Percentage of inhibition was calculated as follows: 100−[(100×Mean fluorescence of Panel B″)/Mean fluorescence of A″]. Mean fluorescence as measured with ImageJ. Each experiment was performed 2 times with 6 immature pears each. The analysis was performed on 3 images per pear corresponding to each inoculation whole (6 pears×3 wholes=24 images/per treatment/experiment).

[0061] FIG. 14: Embodiment of the effect on cell viability after spray-drying of I21 with magnesium sulphate.

[0062] FIG. 15: Embodiment of A) Macroscopic view of in vitro antifungal activity of naked and formulated I21 against M. oryzae at 7-days post-incubation. B) Inhibitory effects of naked and formulated I21 on mycelial growth of M. oryzae at 4 and 7-days. Data are presented as mean±standard deviation (N=3). Data were analyzed by one-way analysis of variance (ANOVA), followed by Tukey's multiple comparison post hoc test (*p<0.05 **p<0.01, ***p<0.001 vs No treatment). The normal distribution of the data was assessed by the Shapiro-Wilk test. Statistical analysis was performed using Prism GraphPad 8.02 Software® (GraphPad Software, La Jolla, CA, USA). ‘MPs’ signifies microparticles.

[0063] FIG. 16: Embodiment of in vitro growth inhibition of the virulent M. oryzae Portuguese isolate PR9GFP by decreasing concentrations of B. velezensis I21 in dual-liquid assays measured by means of fluorescence in a plate reader (BioTek Synergy H1 Plate Reader).

[0064] FIG. 17: Embodiment of the effect of I21 treatment in reducing the infection symptoms caused by the virulent M. oryzae isolate M22.7 in detached rice leaves from the rice blast-susceptible Presto cultivar. A) Phenotype in detached rice leaves treated with PBS (control) and infected with M22.7 24 h later; A′) Detail of a rice leaf with rice blast lesions from Panel A; B) Phenotype in detached rice leaves treated with I21 and infected with M22.7 24 h later; B′) Detail of a rice leaf from Panel B. Each experiment was performed 3 times, with 3 plates containing 5 leaves each.

### DETAILED DESCRIPTION

[0065] The present disclosure relates to a Bacillus velezensis strain, and a composition for plant protection comprising an effective amount of said Bacillus velezensis. The use of the disclosed Bacillus velezensis strain or composition as a biological plant protection agent, and a method for protecting or treating plants and/or fruit from fungal or bacterial infections comprising applying an effective amount of the Bacillus velezensis strain or the composition, are also disclosed.

[0066] In an embodiment, the B. velezensis strain of the present disclosure can be used as a BPPA against phytopathogenic Erwinia bacteria in plants, in particular plants of the Rosaceae family. In a further embodiment, the B. velezensis strain of the present disclosure can be used as a BPPA to prevent or suppress fire blight caused by E. amylovora infection.

[0067] In another embodiment, the B. velezensis strain can be used as a BPPA to prevent or suppress rice blast caused by M. orzyae infection.

[0068] In an embodiment, the BPPA may exert its effect against the pathogens through several mechanisms, including, but not limited to, occupation of growth space otherwise free to the pathogen, creation of micro-environments and biofilms that disfavour colonisation, or release of biosynthetic metabolites/peptides with antimicrobial properties that interfere with pathogen biology.

[0069] In an embodiment, the composition comprising the I21 B. velezensis strain may contain a solvent, water and/or an acceptable buffer.

[0070] In a preferred embodiment, the composition comprising the I21 B. velezensis strain may contain other elements which serve to stabilise the active ingredient and allow application in the field using contemporary agricultural equipment, protect the bacteria from premature degradation due to humidity, temperature and solar ultraviolet light exposure, maintain the viability of the active ingredient over time and finally control the release rate of the active ingredients over time. Agriculturally acceptable compounds may be added to the composition comprising the I21 B. velezensis strain in order to extend shelf-life and optimise the processability and physicochemical characteristics of the formulation. Such agriculturally acceptable compounds can include, but are not restricted to, plant strengtheners, growth promoters, nutrients, wetting agents, solvents, buffers, stabilisers, osmoprotectants, sun protectants, excipients, surfactants, adhesion agents, fertilisers, emulsifiers, vitamins, minerals, additives and/or preservatives and so on.

[0071] In a further embodiment, in order to improve efficacy, onset and duration of action, the composition comprising the I21 B. velezensis strain may be augmented with at least one other BPPA, that can comprise, but not restricted to, essential oils, other beneficial microorganisms, extracts from microorganisms or other natural, semi-synthetic or synthetic biodegradable and non-toxic biomolecules.

[0072] In another aspect, the composition comprising the I21 B. velezensis strain may be in the form of a liquid, concentrate, tablet, gel, pellet, wettable powder, granule or flowable, amongst others. In a preferred embodiment, the formulation is in the form of microcapsules (size range 1-999 μm) or nanocapsules (size range 1-999 nm) wherein the active ingredient is initially retained within the interior of the capsule shell. The microcapsules or nanocapsules may be prepared from one or more materials that may be selected from natural-origin polymers, proteins or lipids, such as, but not limited to, chitosan, alginate, ulvan, fucoidan, carrageenan, xanthan gum, gellan gum, gelatin, arabic gum, lignin, maltodextrin, zein, protamine sulphate or lecithin.

[0073] In another embodiment, the microcapsules or nanocapsules comprising the I21 B. velezensis strain may be prepared from one or more non-toxic, biodegradable synthetic or semi-synthetic materials such as, but not limited to, methacrylate-modified lignin, methacrylated gellan gum, polyvinyl alcohol, low density polyethylene, poly(ε-caprolactone), polyethylene glycol or poly(lactic-co-glycolic acid).

[0074] Through judicious choice of the encapsulation material(s), variation of the polymer concentration, crosslinking density, interior pore size, capsule size, shape and surface charge, it is possible to tune the loading capacity, entrapment efficiency and release kinetics of the entrapped active ingredient. Suitable techniques for microencapsulation include ionic gelation, spray-drying and microfluidics, the latter being suitable also for nanoencapsulation. By optimisation of parameters such as air temperature, feed flow rates and so on, it is possible to fine-tune the physicochemical properties of the capsules, which can, if necessary, be further processed downstream by techniques such as ball-milling and drying by conventional means or on a fluid bed dryer.

[0075] In a preferred embodiment, the concentration of the I21 B. velezensis strain in the composition of the present disclosure is in an effective range, preferably between 1.0×10³ CFU/mL and 1.0×10¹¹ CFU/mL, more preferably between 1.0×10⁵ CFU/mL and 1.0×10¹⁰ CFU/mL and even more preferably between 1.0×10⁶ CFU/mL and 1.0×10⁹ CFU/mL. Preferably, the composition comprises 0.1-5% (w/w) of the disclosed I21 B. velezensis strain, more preferably between 0.5-4% (w/w), and even more preferably between 1-3% (w/w).

[0076] In an embodiment, the plant or fruit to be treated is selected from the Rosaceae family, preferably but not limited to, an apple or a pear plant. The I21 B. velezensis composition may be applied in sufficient amounts to thoroughly wet any of the above ground structures of the plant, including leaves, flowers, stems, trunk, bark, blossoms, buds and fruit, without significant run-off of the applied material. In another embodiment, the plant is a rice plant.

[0077] Another embodiment comprises treatment of the plant before infection (prophylactic application) or after detection of infestation by applying posteriorly the composition comprising the disclosed I21 B. velezensis to minimise the damaging effects caused by the pathogen. At least one further application of the composition may be applied to adequately control the pathogen. This embodiment also provides a formulation for control or suppression of the pathogen that extends the duration of effectiveness of the disclosed composition.

[0078] In an embodiment, application of the composition comprising the I21 B. velezensis is not dependent upon whether the plants have received prior treatment with other plant protection agents of whatever class.

[0079] In an embodiment, the composition comprising the I21 B. velezensis may be applied at any time. In a preferred embodiment however, at least a first application to the plant takes place at the early flower stage, for example from appearance of the first stamen to full bloom.

### Examples

1. Isolation of E. amylovora (Burrill) Winslow et al. (CM1) from Pyrus communis Cultivar Rocha.

[0080] In an embodiment, secondary shoots from a fire blight symptomatic pear orchard (Pyrus communis cultivar Rocha) were collected from the Campo Maior region in Portugal. The plant stems were de-barked, cross-sectioned, disinfected with 70% (v/v) ethanol and stamped onto Kings B (KB) agar media (20 g/L proteose peptone, 10 mL/L glycerol, 1.5 g/L K₂HPO₄, 1.5 g/L MgSO₄·7H₂O, 15 g/L agar). Morphologically different bacteria were selected and re-streaked several times onto KB to obtain single colonies. To molecularly identify the bacteria, genomic DNA was extracted using a quick DNA extraction protocol in which individual bacterial colonies were re-suspended in 500 μL of 0.9% (w/v) NaCl, followed by centrifugation at 12,000×g for 3 min at room temperature. The supernatant was discarded, the pellet re-suspended in 100 μL NaOH solution (20 mM) and vortexed for 1 min in a turbo vortex (this step was repeated twice). The extraction solution was incubated at 100° C. for 5 min, with two cycles of turbo vortexing for 2 min, and then sonication on a water bath for 1 min. To identify E. amylovora amongst the isolated bacteria, a PCR was performed with the primers pEA71Fw and pEA71Rev (pEA71Fw (SEQ ID No. 69, Taylor et al, 2001)-CCTGCATAAATCACCGCTGACAGCTCAATG; pEA71Rev (SEQ ID No. 70, Taylor et al., 2001)-GCTACCACTGATCGCTCGAATCAAATCGGC, respectively) that amplify pEA71, a genomic region specific of this strain (Taylor, 2001). The PCR amplification step was as follows: 3 min of denaturation at 94° C., followed by 35 cycles of 30 sec of denaturation at 94° C., 20 sec annealing at 58° C. and 12 sec of extension at 72° C. finishing with an extension step of 5 min at 72° C. One colony produced the expected PCR fragment of 187 bp and was identified as E. amylovora and named CM1. The molecular identification was further confirmed by amplification and sequencing a partial sequence of the 16S rRNA gene. The PCR amplification step was as follows: 3 min of denaturation at 94° C., followed by 35 cycles (each 30 sec) of denaturation at 94° C., 20 sec annealing at 55° C. and 1:10 min of extension at 72° C., finishing with an extension step of 5 min at 72° C. A 1% (v/v) agarose electrophoresis was performed to confirm amplification of the PCR product. PCR products were purified with a NZYGelpure kit (NZYTech, Lisbon) and Sanger sequenced with the same primers used for amplification (StabVida, Caparica). The sequences were manually trimmed, searched against publicly available databases and confirmed the identification as E. amylovora. Stocks for long term storage were made for all isolates in a final volume of 25% (v/v) glycerol and kept at −80° C.

[0081] For the scope and interpretation of the present disclosure it is defined that “room temperature” should be regarded as a temperature between 15-30° C., preferably between 18-25° C., more preferably between 20-22° C.

[0082] Methods for the alignment of sequences for comparison are well known in the art, such methods include GAP, BESTFIT, BLAST, FASTA and TFASTA. GAP uses an algorithm (Needleman, 1970)) to find the global (over the whole the sequence) alignment of two sequences that maximizes the number of matches and minimizes the number of gaps. The BLAST algorithm (Altschul, 1990)) calculates percent sequence identity and performs a statistical analysis of the similarity between the two sequences. The software for performing BLAST analysis is publicly available through the National Centre for Biotechnology Information (NCBI). Global percentages of similarity and identity may also be determined using one of the methods available in the MatGAT software package (Campanella, 2003). MatGAT: an application that generates similarity/identity matrices using protein or DNA sequences). Minor manual editing may be performed to optimise alignment between conserved motifs, as would be apparent to a person skilled in the art. The sequence identity values, which are indicated in the present subject matter as a percentage were determined over the entire amino acid sequence, using BLAST with the default parameters.

2. Isolation of B. velezensis Strain I21 from Pyrus communis Cultivar Rocha.

[0083] Secondary shoots from a fire blight symptomatic pear orchard (Pyrus communis cultivar Rocha) were collected from the Oeste region in Portugal. The plant stems were treated as above and stamped onto Nutrient Agar (NA, Biolife) and KB agar media. Morphologically different bacteria were selected and re-streaked several times to obtain single colonies. Long term storage and genomic DNA (gDNA) extraction were performed as above. To molecularly identify the bacterial species isolated, a partial sequence of the 16S rRNA gene (1.5 Kb length) was amplified and sequenced. For that, a volume of 1 μL of gDNA was used for PCR. The PCR amplification step was as follows: 3 min of denaturation at 94° C., followed by 35 cycles (each 30 sec) of denaturation at 94° C., 20 sec annealing at 55° C. and 1:10 min of extension at 72° C., finishing with an extension step of 5 min at 72° C. A 1% (v/v) agarose electrophoresis was performed to confirm amplification of the PCR product. PCR products were purified with a NZYGelpure kit (NZYTech, Lisbon) and Sanger sequenced with the same primers used for amplification (StabVida, Caparica). The sequences were manually trimmed, searched against publicly available databases and identified as Bacillus sp. To further characterise the strain, two Bacillus genes rpoB (SEQ ID No 28) (Rooney, 2009) and gyrA (SEQ ID No 29) (Rooney, 2009) were amplified and sequenced. The database search and phylogenetic analysis revealed that the strain belongs to the genus Bacillus velezensis, having high sequence similarity to strain ZeaDK315Endobac16, with the GenBank accession number CP043809.1.

[0084] In an embodiment, to obtain a deeper molecular characterization of the Bacillus velezensis I21 strain, whole-genome sequencing was carried out. Genomic DNA was extracted following a modified version of the Marmur protocol (Salvà-Serra 2018). Library preparation was done using the Illumina Nextera XT kit, following a low-volume protocol (Baym 2015) Whole-genome sequencing was done on an Illumina NextSeq 500, which generated 2.16 million 150 bp paired-end reads. Quality control, trimming and filtering of raw reads was done with Fastp v. 0.23.2, with 2.14 million reads being retained after filtering and trimming. Genome assembly was done with SPAdes v 3.15.5 (Prjibelski 2020) with the—isolate option. Contigs with read coverage <30 (calculated using bbmap) or shorter than 500 bp were discarded. CheckM v1.2.2 (Parks 2015) was used for the assembly quality control, indicating a high-quality assembly, with high completeness (99.41%) and 0% contamination. Quast v 5.2.0 (Gurevich 2013) was used to calculate assembly statistics. This revealed a total genome size of 3,947,764 bp, across 19 contigs, with an N₅₀ of 1,002,146 bp and a GC content of 46.4%. Genome annotations were made using Prokka v 1.14.6 (Seemann 2014) and eggNOG mapper v2.1.10 (Cantalapiedra 2021). EggNOG was run with database version 5.0-2 and flags—itype genome and—prodigal. Prokka was run with—genus set to Bacillus and a protein file from the B. velezensis reference genome GCF_000769555.1 (NCBI accession), to use as priority for annotations. In total 3882 genes were identified, including 3812 coding sequences and 70 noncoding sequences. GTDB-tk v.2.2.6 (Chaumeil 2022) was used to obtain a genome based taxonomic assignment (using reference data version r207). In agreement with the target gene approach (above), the results identified the strain as B. velezensis. To better characterize the genetic relationships of the strain with other B. velezensis strains for which genomes are available, GtoTree v.1.7.08 (Lee 2019) was used to construct a phylogenomic tree (FIG. 1), using as input all genomes identified as B. velezensis in the GTDB database plus the reference genome for B. siamensis (to use as outgroup; total number of genomes in the tree=498). This allowed to show that while there are multiple clades of B. velezensis with highly similar strains (very short/absent branch lengths), the disclosed I21 strain is clearly distinct from its closest relatives. The strain is placed in a clade with 3 strains that have been isolated from South Africa (2) and France (1). One of these strains is ZeaDK315Endobac16, which was identified as the closest relative when using the target gene approach (above). The identified genome comprises the sequences SEQ ID No. 30 to SEQ ID No. 48.

[0085] FIG. 1 depicts the global phylogenomic tree of B. velezensis. As the tree includes 498 genomes, clades were collapsed at a specific branch length to enable better visualisation. Collapsed clades are indicated by points, including ≥2 closely related strains. B. velezensis I21 is shown in black, and the grey point indicates the placement of the Commercial (I16) strain, which belongs to a clade with 12 closely related strains.

[0086] In an embodiment, to understand if the I21 strain carried any proteins that distinguish it from other B. velezensis strains, pangenome analysis was carried with PanACoTA v.1.4.0 (Perrin 2021), with all the B. velezensis genomes used for the phylogenetic tree. This analysis first identifies the protein families present across all genomes (at 80% sequence identity and alignment coverage), followed by the creation of a presence absence matrix that allows the identification of proteins present in specific strains. This analysis led to the identification of 21 proteins, that are present in the I21 strain and not in any other B. velezensis strain. These protein sequences (SEQ ID No 1 to SEQ ID No. 20) were subsequently used for blast searches in order to identify their putative functions (protein sequences, their functions and respective gene sequence are provided in table 1; as 2 proteins are duplicates, only 20 sequences are provided in the table).

TABLE 1
Protein sequences present in the I21 strain and
not in any other B. velezensis strain.

| Seq. | | Organism | |
|---|---|---|---|
| ID | Sequence name | name | Residues |
| Seq. | L-dopachrome tautomerase- | B. velezensis | MKPMLPFEKYFGDLELVYAFYGAMPTGVTVSETG |
| ID. 1 | related protein (closest | | RIFICFPKWGDDVKFTVAEIIGDKLQPYPDLQTN |
| | BLAST homolog; 51% | | LVNPENIKMTFISVQSVVTDGRGTLWVLDTAAPN |
| | alignment coverage, 100% | | FSKPIKGGAKLVAVDLKTNTIRRVYTFTEDVVLP |
| | sequence identity; B. | | TTYLNDVRFDFRVGTAGYAYITDSSSKGPGAIIV |
| | velezensis) | | VDLETGNAFRRLNGEQIQLHRIPILYRK |
| Seq. | L-dopachrome tautomerase- | B. velezensis | MNRNRDGSTSPFRLASDGIAISPDGKVLFFCPLT |
| ID. 2 | related protein (closest | | SRHLFSISTEALRDRNIQDMDLLYHVAYWGEKGA |
| | BLAST homolog; 67% | | SDGMITDAKGAIYAGDYENNSIRKMLPNGTTETI |
| | alignment coverage, 96% | | AHDPRILWPDTFSIGPDGYLYVIVNQLHRQARFH |
| | sequence identity; B. | | YGKDLRQKPYSLLRIKIDEFPAPAF |
| | velezensis) | | |
| Seq. | Terminase small subunit | B. velezensis | MKLTEKQKRFADFYIELGNATEAARKAGYSQKTA |
| ID. 3 | (closest BLAST homolog; | | KSIGQENLTKPDIKSYIKERLAEKDAERVASQDE |
| | 100% alignment coverage; | | ILEFLTAVMRGEKTEQIPVGIGEGAQELEDKDPY |
| | 100% sequence identity; | | LKDRVKAAELLGKRHGMWTEKVDMTGEFAVQFID |
| | B. amyloliquefaciens) | | DSGDEE |
| Seq. | Cell wall-binding protein | B. velezensis | MKKLFKSIILSAALLTGAVAVAPSASAAWSGWQN |
| ID. 4 | YqgA precursor (closest | | ESGYSGRVFTDATTYTAGASTIDWKAEKKGDSGK |
| | BLAST homolog; 44% | | RNYIGTFESAKFQRGIRWR |
| | alignment coverage; 95% | | |
| | sequence identity; | | |
| | Streptococcus pneumoniae) | | |
| Seq. | YycA Aldo-keto reductase | B. velezensis | MAFRLFFHEENFGKTVSQLKKLVDEGKVKYFLLS |
| ID. 5 | (AKR) superfamily | | GNNSGNTKLVSWIKKNGTKNSADPYSTEKNKLSP |
| | (closest BLAST homolog; | | ARNDRRPGRTKSADSV |
| | 75% alignment coverage, | | |
| | 82% sequence identity; | | |
| | B. velezensis) | | |
| Seq. | MarR family transcriptional | B. velezensis | MVNSLKLVQRAELWDEQNENIVEKLYVDHLPNDG |
| ID. 6 | regulator (closest BLAST | | LLREIIQDDTVFLVGKKTGESTIFTRAQEYSRIS |
| | homolog; 16% alignment | | KSEISAYVDVKTMYGKSQVKELNEDSDYCKTLLC |
| | coverage, 80% sequence | | NCFIKSSNKRLIKRSE |
| | identity; B. velezensis) | | |
| Seq. | DUF4181 domain-containing | B. velezensis | MSLLPLNSALCLIEWRNLQAPHPYETSDTFLGGR |
| ID. 7 | protein (closest BLAST | | QLLIFSAVFILLSLMFQVFAVKVLNLPKPVKKQK |
| | homolog; 76% alignment | | PINGTHRLIEITLLITGIAAVNFFNEMYVFAGVV |
| | coverage, 98% sequence | | FMLFCCTGIMEWRHRREEKQYVYDSFYAGLSAAL |
| | identity; Bacillus sp.) | | GVLIFFIS |
| Seq. | Phage integrase SAM-like | B. velezensis | MHSENRKGKRVKAGRASVKTTRKGTYDLEYIFDR |
| ID. 8 | domain-containing protein | | LCDAKRAENVFRKRLISTCVLVDICRIMLKRSEC |
| | (closest BLAST homolog; 27% | | PQTYVILTLTLRAALYRG |
| | alignment coverage; 90% | | |
| | sequence identity; B. | | |
| | amyloliquefaciens) | | |
| Seq. | isocitrate/isopropylmalate | B. velezensis | MKTYKIASIPGDGVGKETVPQAERVLNAIAELHG |
| ID. 9 | family dehydrogenase | | GIAFDFK |
| | (closest BLAST homolog; 43% | | |
| | alignment coverage; 100% | | |
| | sequence identity; Bacillus | | |
| | sp.) | | |
| Seq. | hypothetical protein | B. velezensis | MLKRFFLVFLTLIMSIFAVFAAAEESPGDRVISF |
| ID. 10 | (closest BLAST homolog; 55%% | | DEPMIVLISLGIILCLFIPPFVMSFFGNLVVRII |
| | alignment coverage; 97% | | SGSLSKFYRPHVWGAHSDWISDSQWLFDNSCCRP |
| | sequence identity; Bacillus | | GNFGQFSQCCGHLIRWQDREHK |
| | sp.) | | |
| Seq. | DUF4573 containing domain | B. velezensis | MAPGSPVAPVGPVTPVIPVTPVGPVAPVEPVTPV |
| ID. 11 | (closest BLAST homolog; | | APVSPVAPVGPVIPVGPVSPVAPVTPVGPVSPVA |
| | 99%% alignment coverage; | | PVTPFAPVIPVAPVTPVAPMAPVAPVTPVEPVIP |
| | 64% sequence identity; | | VGPVAPVGPVAPVEPVVPVTPARPVSPVAPVSPV |
| | Clostridium beijerinckii) | | APVTPVGPVGPVGPVGPVIPVEPVTPVAPVGPVD |
| | | | PVIPVGPVTPVEPVSPVTPVGPVPPVAPVSPVGP |
| | | | VGPVAPVEPVGPVTPVIPVVPVVPVAPMAPVAPV |
| | | | SPVGPVSPVEPVAPVRPVSPVAPVTPVEPVEPVT |
| | | | PVAPVIPIDPVTPVTPVVPVGPVAPVEPVSPVEP |
| | | | VTPVEPVDPISPVGPVAPVGPVAPIEPVAPVGPV |
| | | | SPVGPISPVTPVAPVSPVEPVEPVAPVIPVDPVT |
| | | | PVPPVSPVTPVEPVGPVGPVEPVAPVTPVAPVIP |
| | | | VAPVTPVGPVTPVGPVAPVDPVEPVIPVAPVGPI |
| | | | SPVTPVAPVSPIEPVEPVGPFSPVAPVTPVAPVS |
| | | | PVGPVSPVTPVTPVEPVVPVTPVIPVGPASPVAP |
| | | | VSPVEPVSPVAPVTPVAPVTPVEPVAPVSPVEPV |
| | | | TPVDPVGPVAPVIPVEPVDPVGPFSPVGPISPVT |
| | | | PVAPVGPVSPVGPISPVTPVAPVGPVSPVTPVTP |
| | | | VAPVTPVAPVTPVEPVVPVEPVSPVAPVGPVAPV |
| | | | TPVAPVTPVEPVVPVSPVGPVTPVSPVEPVVPIG |
| | | | PVSPVIPVAPIGPVSPVIPVAPVGPVSPVIPVAP |
| | | | VGPVSPVIPVAPVGPVVPVPPVTPVAPVGPVDPV |
| | | | APVTPVEPVAPVDPVTPVAPVDPVTPVAPVSPVE |
| | | | PVTPVAPVSPVEPVIPVAPVAPVVPVEPVEPVSP |
| | | | VAPVAPVTPVAPVSPVEPVIPVAPLSPVEPVTPV |
| | | | EPVAPVVPVTPVGPVSPVGPVSPVIPVAPDAPVA |
| | | | PVSPVDPVSPVDPVAPVTPVEPVAPVTPVGPVTP |
| | | | VDPVSPVGPVSPVIPVGPAAPVGPVTPVEPVDPV |
| | | | TPVGPVDPVDPVAPVGPIAPVAPVDPVDPIAPVT |
| | | | PVGPVSPVAPVTPVAPVDPVTPVGPVVPVAPVIP |
| | | | VAPVAPDAPVDPVSPVDPVTPVGPVEPVDPVAPV |
| | | | GPAAPVVPVAPVEPVAPIEPVNPVGPVTPAGPVA |
| | | | PVEPVGPISPVEPVAPVTPVNPVGPVSPVAPVEP |
| | | | VTPVVPVTPVAPVSPVGPVIPVDPVAPDAPVTPV |
| | | | GPAAPVEPVSPVAPVTPVTPVDPMTPVGPVTPVD |
| | | | PVNPVSPVEPVTPVVPVTPVAPVSPVGPVAPVGP |
| | | | VTPVAPVSPVTPVTPVAPVIPVAPVSPVEPVAPV |
| | | | GPVTPVAPIGPVTPVGPVAPVEPVEPVAPVSPVD |
| | | | PVGPVSPVEPVDPVSPVDPVTPVDPVTPVGPVTP |
| | | | VSPVDPVDPVAPVTPVGPVSPVGPVTPVAPVSPV |
| | | | GPVIPVAPVGPMGPVAPVAPVIPVAPVTPVDPVS |
| | | | PVDPVAPVTPVEPVTPVTPVEPVAPVDPVAPVEP |
| | | | VAPVTPVEPVEPVAPVTPVGPVTPVAPVSPVGPV |
| | | | APVAPVTPVEPVDPVKPVDPVKPVDPVKPVGPVA |
| | | | PVSPVGPVAPVEPVVPVPPVTPVTPVDPVDPVAP |
| | | | VSPVGPFSPVGPVEPVTPVAPVGPVGPVIPVAPV |
| | | | TPVAPISPVAPVTPVAPVDPVAPVEPVAPVGPIG |
| | | | PVTPVAPVIPVAPVTPVDPVTPVGPVSPVEPVAP |
| | | | VVPVIPVGPVTPVGPISPIGPVSPVEPVEPVDPV |
| | | | APVGPVLPAEPVTPVDPVTPVGPVEPVGPVAPVE |
| | | | PVDPVTPVGPVTPVAPVMPVAPVAPVDPVAPIEP |
| | | | VNPVGPVTPSWPVTPVAPVTPVDPVTPVGPVTPV |
| | | | GPDAPVDPVTPVAPVVPVEPVVPVAPVEPVPPVT |
| | | | PLGPVTPVGPVTPVGPVIPVTPGSPPVCANETSS |
| | | | IKIVPVETLLNTMTAEAAPEGTLLVL |
| Seq. | restriction endonuclease | B. velezensis | MLNDYIKPSILWTDVEDRIDATFYRTDFVVSLDK |
| ID. 12 | subunit S (closest BLAST | | IFKNLTIPVLPNRQLIHELTDYTANGSFESLKKN |
| | homolog; 43% alignment | | VRYTNEAGIPMIRGKNLKNGVLDKTDLNYVTDDT |
| | coverage; 45% sequence | | YRFLKKSELNAGDLLFTKTGTLGNTIVWSEYFGK |
| | identity; Paraclostridium | | ATLGDNIFKVRYKNGINPYYIHAYFSTDYGYKWV |
| | bifermentans) | | ERFAQGGVQPTIILALVKSEISAEPLVIPLPNTS |
| | | | DPL |
| Seq. | N-6 DNA methylase (closest | B. velezensis | MQALIEELKEQLMMKGYSTFSGPETHEEDGTTIF |
| ID. 13 | BLAST homolog; 100% | | LASGDEKIVYVKVFDKGADLSFEVQDAALIEAQY |
| | alignment coverage; 95% | | HEEAPDFIWASNGEVNYYADCIESDPLAEIPAVI |
| | sequence identity; B. | | DVTKKEKRQISKQEEWSRKMYSTLQKRFDDLHER |
| | subtilis) | | LYGPGGADNISSTNEAIDELSKLLFMETFRLYHP |
| | | | DYVLREGENAGLRILDILKYQYIKENGKEAVRQI |
| | | | RDAFKEIKNHEDYVAVNDLGEECFIFSEDEYIRL |
| | | | ENPANFIAAFETFQELDDFEDENGNRVKATLKNV |
| | | | SADILGRLFDVLMRGKYDNKIGQATYLTPRQVTE |
| | | | AMIEMVVHDLTSNPKEASKLITADEKGIPTFRMG |
| | | | DITCGSGGFLIKGYEAVKKYMLTQFTGTMKEKME |
| | | | KHFELMKEHSFVGADKTRNMVLKARLNMAMHGLP |
| | | | KAPIFWVNDSLMTESLKPKSFDLIVTNPPFKSGS |
| | | | VSSKTDEGKAILERYSEGIDETGKPKKEGLCLGA |
| | | | KPNPKGIWKEVSSTDQAVLFIDRNLQLLKDGGQL |
| | | | IIVLPDGILSNSGYKHVREYLMGKKNEVTGEFEG |
| | | | GKGIVKAVVSLPTVTFQLSGTGAKTSFLYIKKKE |
| | | | HENEKQGPVFMAVAEEIGFDVKNKIEVQLGNDRN |
| | | | DLLKIVDVYKKGVN |
| Seq. | hypothetical protein | B. velezensis | MRLILHEYLTIPKTTEQLVNIAKEHGLNWNEEQV |
| ID. 14 | (closest BLAST homolog; | | KLYCLLDPSIYETESGQWAVKVDDRRHTILGAIE |
| | 100% alignment coverage; | | KALEKRPMTKIDPNIIEQLPSDMIVPHNEVIEVA |
| | 98% sequence identity; B. | | VSTGRYESPRENIIRVKRK |
| | subtilis) | | |
| Seq. | class III lanthipeptide | B. velezensis | MKEVLVLQQFDEKSEVEPTAWTVTLTTISVTLST |
| ID. 15 | (closest BLAST homolog; | | LSNHC |
| | 100% alignment coverage; | | |
| | 100% sequence identity; | | |
| | B. amyloliquefaciens) | | |
| Seq. | class III lanthionine | B. velezensis | MDKKLVYFQHMSEDSKYYIEKSPNAETDPYEVHN |
| ID. 16 | synthetase LanKC | | IPNHYTVSTEYKSPWKFYNNPNHNLKEQGWKIHV |
| | (closest BLAST homolog; | | SATMNNAQDILKVVSQIMFKHQIPFKHIKDKQSL |
| | 100% alignment coverage; | | FNMNSKHGNRTSSGKFIAIYPSSNNMFFDLLNEL |
| | 97% sequence identity; | | YEELKHYENGPYILNDKSWKDSNIYYRYGAFKNI |
| | Bacillus sp.) | | YNERGELCIKDENGNLIPDNRNPYYKIPDFVSDF |
| | | | DQFLDTKNNLLDTQDVSNFNDYEFQGVLRFNNGG |
| | | | GIYTGIRKSDGKKVVIKEGRPKVGLDGQYNDAID |
| | | | RLNIEYEALNKLTEVEGVVKALDYFKAWKHVFLV |
| | | | EEFVEGVTLQSWCAINYPFNVETDKNEYISKVKK |
| | | | IINSLIKAIKLMHSKNVGMGDLQPQNIMITPELN |
| | | | VKIIDFEAASALSEENGALQTIGYTHKKNKNHKE |
| | | | RDWYALKKVLRFCILPIGPVVDIEETIKKKHDMW |
| | | | IEEEFGKDVYQYVVNTENLCDKYLSDTKEKRFNN |
| | | | NYDSKIQKEMDMSKIIKGLRKNIESNILPNSSLI |
| | | | HGDVRQFVMPSGKLNVLTGGTGAALALYRSGNIN |
| | | | KRVQDWIEIVLLENLNVLNDDIGLFTGKAGIAVT |
| | | | LYELGYTEQAVDIFNNLSYEDMKDISLRSGLSGI |
| | | | GLSLISLYLEENNDDLLVTSEKIADQIENRIIED |
| | | | DELSVTDFAAVPIGLIDGWSGISLFYAALYSVTN |
| | | | NEKYYLKSKEYIERDLKHCKVDEETNTLQTYDDQ |
| | | | NPRLLPYLSGGSIGIGIAIWYLNYVRDTNLFREE |
| | | | LEQIINLNKVRIAYSGGLFDGIGSFLLIPPMTKE |
| | | | KNEISQHIELAMKKLELFLIRKDDQILFPGNFSF |
| | | | RLADDYYSGSAGIILGINSIQFSNPLYWLPIIKI |
| | | | DSFLRKTKKELLLNN |
| Seq. | ABC transporter ATP-binding | B. velezensis | MMTSPKFKSIEFFFLLRKTRPNIRLFILAIFLSG |
| ID. 17 | protein (closest BLAST | | LSAIASTLVPHYLKSLIDNYNILDKINLRDLLGL |
| | homolog; 100% alignment | | LGIFLSSGIIGAVGSYMLSVVGYNVVANLRNLLW |
| | coverage; 96% sequence | | EKIVILPVEFYDKNRSADIASRFVNDTTVIYNLV |
| | identity; B. vallismortis) | | SNSFSQFINAILIVLFCGFWLFYYDWQLTLVIIV |
| | | | AIPIYLLIFIPLGRILSKLSKMTQSLTGKLNVRA |
| | | | VETISSIRLIKSSTAEKLQVEKGRDDIEALRNIG |
| | | | LRQTKWMVILNPIINLMMMLIIISIIGFGGVKLA |
| | | | NGSLSPGTFIAFLTLMFYIIGPLNNLGLFFTQIQ |
| | | | KTIGATERISQLIYEQGEDQHKGKELAETYKDLV |
| | | | IENLSFCYGKEDKAFSLNNINLVIKRGSVNALVG |
| | | | PSGSGKTTIISILERYYKPNSGSIYFGEENIELY |
| | | | SLKSWRSQIGYVAQNHDLISGTVRDNLIFGLENT |
| | | | PNENRIVEACKKAYAWQFISELPNSLETNIGEKG |
| | | | LNLSGGQRQRIAIARMFLKNPNIIFLDEATASLD |
| | | | SHSEQIVNEAMKKLMKDRTAIIIAHRLSTIINAD |
| | | | NIIFMENGEVTGQGNHWELKRSHKLYHQFCEQQF |
| | | | KEDSTDPLVLTN |
| Seq. | S8 family serine peptidase | B. velezensis | MKNLRRISMVFILLFVSSLQPISSHAEESNYDES |
| ID. 18 | (closest BLAST homolog; | | IIINLDSKVSESTINKVKDRYSNIGTNYIKELDL |
| | 100% alignment coverage; | | LVIDNIKPSQFSAIKDIAKEKLDAKEIIEDKEIS |
| | 94% sequence identity; B. | | LPSKQLSSKLAISSQFTEDNDTLYDSWLWNIKQV |
| | halotolerans) | | TNDYRSYRINKGSHNTKVGVIDSGIDFNHPDLKN |
| | | | NIVDTGESFVPVEDNTQDFYGHGTSVAGIIAANG |
| | | | DVKGVGPNLGLVPYKVFDKNGKSKTSWVISAIVK |
| | | | ATEDDMDVINLSLSTFLSKKDKEDRETIKLFEKA |
| | | | FKFARKHNTLIVAAAGNHGYDISNSKKLAQQLGK |
| | | | PKDNILLLPGGDNDVITVSATTAQNTKASYSNYG |
| | | | KTISIAAPGGDLDPSFLDTNKVDLYSLVWTTSPV |
| | | | NIPQTPLSKSLGFQKGYEPTLGTSVAAPIVTATA |
| | | | ALLKTEYYEKYGVEMSNRKVEKNLYQNTDHFENL |
| | | | NKNEVGSGIVNAYESLLNIER |
| Seq. | class III lanthipeptide | B. velezensis | MNNVLALQQLNKSAEVEPQVGPTITTITVIPTMV |
| ID. 19 | (closest BLAST homolog; | | ISLISNYCDNHAS |
| | 100% alignment coverage; | | |
| | 100% sequence identity; | | |
| | B. nakamurai) | | |
| Seq. | class III lanthipeptide | B. velezensis | MRDVLELQQLNEGTEVEASKGKGGLLTLITTVVG |
| ID. 20 | (closest BLAST homolog; | | TSTISNNCG |
| | 100% alignment coverage; | | |
| | 100% sequence identity; | | |
| | B. subtilis) | | |
| Seq. | L-dopachrome tautomerase- | B. velezensis | ATGAAACCTATGCTGCCTTTTGAAAAATATTTTG |
| ID. 49 | related protein - gene | | GGGATTTAGAACTGGTTTATGCATTTTATGGAGC |
| | | | TATGCCTACTGGTGTTACTGTTTCAGAAACTGGT |
| | | | CGTATTTTCATTTGTTTTCCGAAATGGGGAGACG |
| | | | ATGTTAAATTTACGGTGGCGGAGATAATTGGGGA |
| | | | TAAATTGCAGCCTTATCCTGATTTACAAACCAAT |
| | | | TTGGTTAACCCTGAGAATATCAAAATGACTTTCA |
| | | | TCAGTGTCCAAAGTGTAGTTACTGATGGAAGAGG |
| | | | AACACTTTGGGTACTAGATACGGCGGCACCCAAT |
| | | | TTTTCTAAACCAATTAAAGGCGGGGCAAAATTAG |
| | | | TCGCTGTTGATTTAAAAACCAATACAATCAGAAG |
| | | | AGTTTATACCTTTACAGAAGATGTTGTTCTTCCA |
| | | | ACAACTTACCTGAATGATGTCCGATTTGATTTTC |
| | | | GTGTTGGAACTGCAGGTTATGCCTATATAACGGA |
| | | | TTCTTCTTCCAAAGGACCAGGAGCTATTATCGTC |
| | | | GTGGATTTAGAAACCGGAAACGCATTTAGACGGT |
| | | | TAAATGGAGAGCAAATCCAACTTCACCGGATTCC |
| | | | TATTTTATACCGAAAATAG |
| Seq. | L-dopachrome tautomerase- | B. velezensis | ATGAATCGTAACAGGGATGGTTCAACTTCCCCGT |
| ID. 50 | related protein - gene | | TTAGGCTGGCATCCGACGGTATTGCGATTTCTCC |
| | | | TGACGGAAAGGTATTATTTTTTTGTCCACTGACC |
| | | | AGCCGTCATCTGTTCTCGATCTCAACAGAAGCCC |
| | | | TGAGAGATAGAAATATACAGGACATGGATTTACT |
| | | | TTATCATGTGGCGTATTGGGGAGAAAAAGGCGCG |
| | | | TCTGATGGAATGATTACAGATGCAAAAGGAGCCA |
| | | | TTTATGCCGGAGATTATGAGAACAATAGTATTCG |
| | | | AAAGATGCTGCCGAATGGCACAACGGAAACCATC |
| | | | GCACATGATCCGAGAATTTTATGGCCGGATACTT |
| | | | TTTCGATTGGTCCGGATGGATACTTATACGTCAT |
| | | | CGTGAACCAATTACATCGGCAGGCTAGATTTCAT |
| | | | TATGGAAAGGACTTACGACAGAAACCTTATAGTT |
| | | | TACTTCGTATCAAAATTGATGAATTTCCTGCTCC |
| | | | TGCTTTTTGA |
| Seq. | Terminase small subunit - | B. velezensis | ATGAAATTGACAGAGAAACAGAAGCGTTTTGCCG |
| ID. 51 | gene | | ACTTTTATATTGAGCTTGGTAATGCGACTGAAGC |
| | | | GGCTAGAAAAGCGGGTTACAGCCAAAAGACAGCT |
| | | | AAATCAATTGGTCAAGAGAACCTGACGAAACCTG |
| | | | ACATCAAATCCTATATTAAAGAGCGGCTTGCTGA |
| | | | AAAGGATGCGGAAAGGGTGGCTTCACAAGACGAG |
| | | | ATTCTTGAATTCTTAACGGCAGTGATGCGGGGCG |
| | | | AGAAGACTGAACAGATTCCCGTCGGCATCGGAGA |
| | | | AGGCGCTCAGGAATTAGAGGATAAAGACCCCTAT |
| | | | CTAAAGGATCGGGTGAAAGCAGCTGAACTGCTCG |
| | | | GTAAGCGGCACGGTATGTGGACTGAGAAAGTTGA |
| | | | TATGACAGGCGAATTCGCTGTGCAGTTCATTGAT |
| | | | GACTCAGGTGATGAAGAATGA |
| Seq. | Cell wall-binding protein | B. velezensis | ATGAAAAAACTATTCAAATCAATCATTTTATCAG |
| ID. 52 | YqgA precursor - gene | | CTGCATTACTTACGGGAGCGGTGGCCGTTGCGCC |
| | | | GTCTGCTTCCGCAGCATGGTCAGGCTGGCAAAAT |
| | | | GAATCTGGGTACAGCGGCCGGGTGTTTACGGATG |
| | | | CCACGACATACACGGCTGGCGCTTCCACGATAGA |
| | | | CTGGAAAGCCGAGAAAAAAGGTGATTCCGGCAAG |
| | | | AGGAACTATATCGGAACATTTGAATCAGCTAAAT |
| | | | TTCAAAGGGGGATTCGATGGCGCTGA |
| Seq. | YycA Aldo-keto reductase | B. velezensis | ATGGCTTTCCGCCTCTTTTTTCACGAAGAAAATT |
| ID. 53 | (AKR) superfamily - gene | | TTGGCAAAACAGTCTCACAGCTGAAAAAACTTGT |
| | | | TGACGAAGGAAAAGTGAAATATTTCTTATTATCC |
| | | | GGAAACAATTCAGGCAACACAAAGCTTGTCTCAT |
| | | | GGATTAAAAAGAACGGCACAAAAAACTCAGCTGA |
| | | | CCCATACAGCACCGAAAAAAACAAGCTCAGCCCG |
| | | | GCAAGGAATGACAGGCGGCCCGGGCGGACAAAGT |
| | | | CAGCAGACTCTGTATGA |
| Seq. | MarR family transcriptional | B. velezensis | ATGGTTAACTCATTGAAACTAGTTCAAAGAGCGG |
| ID. 54 | regulator - gene | | AATTATGGGATGAGCAAAATGAAAATATAGTTGA |
| | | | GAAGTTATACGTAGATCACTTACCAAACGATGGC |
| | | | CTACTTAGGGAAATTATACAGGATGATACTGTTT |
| | | | TTTTGGTGGGAAAAAAAACAGGAGAGTCCACGAT |
| | | | TTTTACAAGGGCCCAAGAATATTCTCGTATAAGT |
| | | | AAAAGTGAGATTTCCGCATATGTTGATGTAAAAA |
| | | | CAATGTACGGTAAGTCCCAAGTCAAAGAACTAAA |
| | | | TGAGGATTCAGATTATTGTAAAACCTTACTTTGT |
| | | | AATTGTTTTATTAAATCAAGTAATAAGCGACTTA |
| | | | TTAAAAGAAGTGAATAA |
| Seq. | DUF4181 domain-containing | B. velezensis | TTGAGTCTTTTACCATTAAACTCAGCCTTATGTC |
| ID. 55 | protein - gene | | TTATAGAATGGCGAAACTTACAAGCTCCTCACCC |
| | | | GTATGAAACGAGTGACACATTTTTAGGAGGCAGA |
| | | | CAGTTACTGATTTTTTCAGCCGTATTTATTTTGC |
| | | | TCAGCCTTATGTTTCAAGTATTTGCCGTCAAAGT |
| | | | TCTCAATTTGCCAAAGCCTGTTAAAAAGCAGAAG |
| | | | CCGATAAACGGCACACATCGATTAATCGAAATCA |
| | | | CACTGCTTATTACGGGCATCGCAGCGGTGAATTT |
| | | | TTTCAATGAAATGTACGTATTTGCGGGAGTTGTT |
| | | | TTCATGCTATTTTGCTGCACCGGCATAATGGAAT |
| | | | GGCGGCACCGGCGGGAGGAAAAGCAATATGTGTA |
| | | | CGATTCGTTTTACGCGGGTCTTTCTGCCGCGCTT |
| | | | GGCGTGCTTATTTTTTTCATCAGTTAG |
| Seq. | Phage integrase SAM-like | B. velezensis | ATGCATTCAGAAAATCGAAAAGGTAAGCGTGTGA |
| ID. 56 | domain-containing protein - | | AGGCCGGAAGGGCCTCGGTAAAGACAACGCGAAA |
| | gene | | AGGTACGTACGATCTCGAATACATATTCGATAGA |
| | | | CTGTGCGATGCCAAACGTGCTGAGAATGTCTTCA |
| | | | GGAAACGATTGATAAGTACATGCGTGCTTGTTGA |
| | | | TATTTGTCGGATTATGCTGAAGAGATCGGAGTGT |
| | | | CCGCAGACATACGTCATATTGACGTTGACTTTGC |
| | | | GCGCGGCTTTGTATCGTGGCTGA |
| Seq. | isocitrate/isopropylmalate | B. velezensis | ATGAAAACATACAAGATTGCCAGCATACCGGGGG |
| ID. 57 | family dehydrogenase - gene | | ACGGTGTAGGGAAAGAAACAGTTCCGCAAGCGGA |
| | | | ACGGGTGTTGAACGCAATCGCCGAATTACATGGA |
| | | | GGCATTGCCTTTGATTTCAAATGA |
| Seq. | hypothetical protein - gene | B. velezensis | TTGCTGAAAAGGTTTTTTCTTGTTTTTCTTACGC |
| ID. 58 | | | TGATAATGTCTATATTTGCTGTATTCGCGGCTGC |
| | | | TGAAGAGTCTCCCGGCGATCGTGTCATTTCTTTT |
| | | | GACGAGCCTATGATTGTATTGATCTCACTCGGAA |
| | | | TCATCTTATGTTTGTTCATTCCGCCATTCGTCAT |
| | | | GTCCTTTTTTGGCAACTTGGTTGTGAGAATCATA |
| | | | TCCGGGAGTTTATCAAAGTTTTATCGTCCTCACG |
| | | | TTTGGGGGGCTCATTCCGATTGGATTTCTGATTC |
| | | | CCAATGGCTTTTTGACAATTCTTGCTGCCGTCCT |
| | | | GGGAACTTTGGTCAGTTCAGCCAGTGTTGCGGCC |
| | | | ACCTTATTCGTTGGCAGGACAGAGAACACAAGTA |
| | | | A |
| Seq. | DUF4573 containing domain - | B. velezensis | GTGGCTCCTGGTTCTCCCGTTGCTCCAGTTGGTC |
| ID. 59 | gene) | | CTGTTACACCAGTTATTCCCGTTACACCAGTTGG |
| | | | ACCAGTTGCTCCGGTTGAACCTGTTACTCCTGTT |
| | | | GCGCCGGTTTCTCCTGTTGCTCCTGTTGGACCCG |
| | | | TGATTCCGGTTGGGCCAGTTTCTCCAGTCGCCCC |
| | | | AGTTACTCCGGTTGGTCCCGTTTCTCCGGTCGCC |
| | | | CCTGTTACTCCATTTGCTCCAGTTATACCCGTTG |
| | | | CTCCAGTCACTCCGGTTGCTCCCATGGCTCCGGT |
| | | | TGCCCCGGTTACTCCTGTTGAACCCGTGATTCCT |
| | | | GTTGGCCCTGTTGCTCCAGTCGGCCCTGTTGCTC |
| | | | CAGTCGAGCCGGTTGTTCCCGTTACTCCTGCTAG |
| | | | GCCGGTTTCTCCAGTAGCTCCGGTTTCTCCGGTT |
| | | | GCGCCAGTAACTCCAGTTGGACCGGTTGGGCCTG |
| | | | TTGGCCCGGTTGGACCTGTTATTCCGGTTGAGCC |
| | | | GGTTACACCAGTCGCCCCAGTTGGGCCGGTTGAT |
| | | | CCTGTAATTCCGGTAGGGCCTGTTACTCCAGTTG |
| | | | AACCGGTTTCTCCTGTTACACCCGTTGGACCTGT |
| | | | TCCCCCGGTTGCGCCTGTTTCTCCAGTTGGGCCG |
| | | | GTTGGACCGGTTGCACCAGTCGAGCCGGTTGGGC |
| | | | CTGTTACTCCAGTCATTCCGGTTGTTCCCGTGGT |
| | | | TCCGGTTGCTCCCATGGCTCCGGTTGCCCCGGTT |
| | | | TCTCCTGTTGGACCCGTTTCTCCCGTTGAACCTG |
| | | | TTGCGCCGGTTAGGCCAGTTTCTCCAGTTGCACC |
| | | | GGTTACACCAGTCGAACCGGTTGAGCCTGTTACT |
| | | | CCAGTCGCTCCTGTTATCCCCATTGACCCAGTCA |
| | | | CTCCCGTTACACCGGTTGTGCCGGTTGGACCGGT |
| | | | TGCTCCTGTTGAGCCAGTTTCTCCGGTTGAACCT |
| | | | GTCACTCCCGTTGAACCAGTTGACCCTATTTCTC |
| | | | CGGTTGGACCCGTTGCCCCAGTTGGGCCGGTTGC |
| | | | TCCGATTGAACCTGTTGCTCCGGTTGGACCGGTC |
| | | | TCTCCCGTTGGGCCGATTTCTCCAGTTACACCGG |
| | | | TTGCGCCGGTTTCTCCCGTTGAACCAGTTGAGCC |
| | | | GGTTGCTCCGGTTATTCCTGTTGACCCTGTTACA |
| | | | CCGGTCCCTCCGGTTTCTCCCGTTACACCCGTTG |
| | | | AACCGGTTGGGCCGGTTGGGCCGGTTGAGCCAGT |
| | | | CGCCCCAGTTACTCCTGTTGCTCCAGTTATACCC |
| | | | GTTGCTCCAGTCACACCCGTTGGACCAGTCACAC |
| | | | CCGTTGGACCAGTTGCGCCTGTTGATCCGGTTGA |
| | | | GCCCGTTATTCCGGTCGCTCCCGTTGGTCCGATT |
| | | | TCTCCAGTTACACCGGTTGCGCCGGTTTCTCCCA |
| | | | TTGAGCCAGTTGAGCCGGTTGGGCCGTTTTCTCC |
| | | | CGTTGCACCAGTTACTCCGGTTGCTCCAGTTTCT |
| | | | CCTGTTGGGCCAGTTTCTCCAGTTACACCGGTTA |
| | | | CACCAGTCGAGCCGGTTGTTCCTGTTACTCCAGT |
| | | | CATTCCGGTTGGACCGGCTTCTCCAGTAGCTCCG |
| | | | GTATCCCCGGTCGAGCCAGTTTCTCCGGTTGCTC |
| | | | CAGTTACTCCCGTTGCCCCTGTTACTCCGGTTGA |
| | | | GCCAGTCGCGCCAGTTTCTCCAGTTGAACCTGTC |
| | | | ACTCCTGTTGATCCGGTTGGACCCGTTGCCCCTG |
| | | | TTATTCCGGTTGAGCCTGTTGATCCGGTTGGACC |
| | | | GTTCTCTCCCGTTGGGCCGATTTCTCCAGTTACA |
| | | | CCCGTTGCCCCTGTTGGGCCGGTTTCTCCCGTTG |
| | | | GGCCGATTTCTCCAGTTACACCCGTTGCCCCTGT |
| | | | TGGGCCGGTTTCTCCCGTTACCCCAGTTACTCCG |
| | | | GTCGCTCCAGTTACTCCCGTCGCCCCGGTTACAC |
| | | | CAGTCGAGCCGGTTGTTCCTGTCGAGCCAGTTTC |
| | | | TCCGGTTGCTCCAGTCGGTCCTGTTGCTCCAGTT |
| | | | ACTCCCGTTGCACCGGTTACTCCTGTTGAGCCCG |
| | | | TGGTTCCGGTTTCTCCGGTTGGCCCTGTTACACC |
| | | | GGTTTCTCCGGTTGAACCCGTTGTTCCGATTGGG |
| | | | CCGGTTTCTCCTGTTATCCCCGTTGCTCCAATTG |
| | | | GGCCGGTTTCTCCTGTTATCCCCGTTGCTCCAGT |
| | | | TGGGCCGGTTTCTCCTGTTATCCCCGTTGCTCCA |
| | | | GTCGGGCCGGTTTCTCCTGTTATCCCCGTTGCTC |
| | | | CAGTTGGGCCGGTTGTTCCCGTTCCCCCGGTTAC |
| | | | ACCAGTCGCTCCGGTTGGGCCGGTTGACCCTGTT |
| | | | GCTCCTGTTACTCCAGTTGAGCCCGTTGCGCCAG |
| | | | TCGATCCGGTTACTCCCGTCGCTCCAGTCGATCC |
| | | | GGTTACTCCCGTCGCTCCAGTTTCTCCTGTTGAA |
| | | | CCAGTTACACCAGTTGCACCGGTTTCTCCGGTTG |
| | | | AGCCAGTAATCCCTGTTGCTCCTGTTGCTCCTGT |
| | | | TGTTCCGGTTGAACCAGTTGAGCCGGTTTCTCCG |
| | | | GTTGCACCTGTTGCTCCAGTCACTCCAGTTGCAC |
| | | | CGGTTTCACCTGTTGAGCCAGTAATCCCTGTTGC |
| | | | ACCGCTTTCTCCTGTTGAACCAGTTACACCAGTT |
| | | | GAGCCCGTTGCTCCTGTTGTTCCCGTTACACCAG |
| | | | TTGGACCAGTTTCTCCGGTTGGGCCAGTTTCTCC |
| | | | AGTTATTCCCGTTGCTCCGGATGCACCCGTCGCT |
| | | | CCAGTTTCTCCTGTCGATCCGGTTTCTCCGGTTG |
| | | | ACCCTGTTGCTCCTGTTACTCCAGTTGAGCCAGT |
| | | | CGCTCCAGTTACTCCCGTTGGACCAGTTACACCC |
| | | | GTCGATCCTGTATCCCCGGTTGGCCCGGTTTCTC |
| | | | CGGTTATACCAGTTGGCCCTGCTGCTCCTGTTGG |
| | | | GCCAGTTACTCCCGTTGAACCAGTTGATCCCGTT |
| | | | ACACCAGTTGGACCGGTTGATCCGGTTGATCCGG |
| | | | TTGCGCCTGTTGGGCCGATTGCACCCGTTGCACC |
| | | | GGTTGATCCTGTTGATCCTATTGCCCCAGTTACT |
| | | | CCTGTTGGGCCAGTTTCTCCCGTTGCCCCAGTTA |
| | | | CTCCAGTTGCACCGGTTGATCCTGTTACCCCAGT |
| | | | TGGGCCTGTTGTTCCTGTTGCTCCAGTTATTCCA |
| | | | GTGGCGCCCGTTGCGCCGGATGCACCTGTCGATC |
| | | | CGGTTTCTCCTGTTGATCCAGTTACTCCGGTTGG |
| | | | GCCTGTTGAACCTGTCGATCCCGTTGCTCCGGTT |
| | | | GGGCCTGCTGCGCCAGTTGTGCCAGTTGCGCCGG |
| | | | TTGAGCCGGTCGCACCAATTGAGCCGGTCAATCC |
| | | | AGTTGGACCAGTCACTCCGGCTGGGCCAGTTGCG |
| | | | CCGGTTGAGCCAGTTGGCCCGATTTCTCCAGTTG |
| | | | AACCGGTCGCTCCTGTTACTCCGGTGAACCCCGT |
| | | | TGGTCCAGTCAGCCCCGTTGCTCCGGTTGAACCT |
| | | | GTTACCCCGGTTGTCCCCGTTACACCAGTCGCTC |
| | | | CTGTATCCCCGGTCGGACCTGTTATTCCGGTTGA |
| | | | CCCGGTTGCCCCCGATGCACCTGTTACTCCGGTT |
| | | | GGACCTGCCGCTCCGGTTGAGCCTGTTTCTCCCG |
| | | | TCGCCCCGGTTACCCCTGTTACTCCTGTCGATCC |
| | | | CATGACCCCCGTCGGGCCAGTCACACCAGTTGAT |
| | | | CCGGTTAACCCCGTTTCTCCGGTTGAACCTGTTA |
| | | | CCCCAGTTGTCCCAGTTACCCCAGTCGCTCCTGT |
| | | | ATCCCCGGTTGGACCGGTTGCTCCTGTTGGACCT |
| | | | GTTACTCCGGTCGCTCCGGTGAGCCCGGTTACTC |
| | | | CCGTTACTCCTGTTGCTCCCGTTATCCCAGTTGC |
| | | | TCCGGTTTCTCCGGTCGAGCCGGTTGCACCCGTT |
| | | | GGACCAGTTACACCAGTCGCCCCAATTGGGCCAG |
| | | | TCACACCAGTTGGGCCTGTTGCTCCAGTTGAGCC |
| | | | CGTTGAGCCAGTCGCTCCTGTTTCTCCTGTCGAT |
| | | | CCCGTTGGACCAGTCTCCCCAGTTGAACCGGTTG |
| | | | ACCCCGTTTCTCCTGTTGATCCGGTTACACCAGT |
| | | | TGACCCCGTGACCCCAGTCGGGCCAGTCACTCCT |
| | | | GTTTCTCCTGTTGATCCTGTTGATCCTGTTGCCC |
| | | | CTGTTACTCCTGTTGGGCCAGTTTCTCCAGTTGG |
| | | | CCCAGTTACACCCGTCGCTCCTGTCTCCCCGGTC |
| | | | GGACCTGTTATTCCGGTCGCTCCTGTTGGGCCGA |
| | | | TGGGGCCAGTAGCCCCTGTGGCTCCCGTTATCCC |
| | | | CGTTGCCCCAGTTACTCCAGTTGACCCCGTTTCT |
| | | | CCTGTTGATCCCGTTGCTCCTGTTACTCCGGTTG |
| | | | AACCTGTTACCCCAGTCACTCCAGTTGAACCGGT |
| | | | TGCTCCCGTCGATCCCGTTGCACCCGTTGAGCCG |
| | | | GTGGCTCCTGTTACTCCAGTTGAGCCCGTTGAGC |
| | | | CAGTCGCTCCAGTTACTCCCGTTGGGCCAGTTAC |
| | | | ACCAGTCGCTCCTGTATCCCCGGTTGGACCAGTT |
| | | | GCTCCTGTTGCTCCAGTTACTCCCGTTGAACCAG |
| | | | TTGATCCCGTTAAACCAGTTGATCCCGTTAAACC |
| | | | AGTTGATCCCGTTAAACCAGTTGGACCGGTTGCT |
| | | | CCGGTTTCTCCTGTTGGTCCTGTTGCACCAGTCG |
| | | | AGCCGGTTGTTCCCGTTCCCCCGGTTACACCAGT |
| | | | TACCCCAGTCGATCCTGTCGATCCCGTTGCACCC |
| | | | GTTTCTCCTGTTGGACCGTTTTCTCCCGTTGGGC |
| | | | CGGTTGAGCCAGTTACTCCTGTTGCGCCTGTTGG |
| | | | TCCTGTTGGTCCGGTTATCCCTGTTGCACCAGTT |
| | | | ACACCGGTCGCTCCGATTTCTCCTGTTGCTCCAG |
| | | | TTACTCCGGTCGCACCAGTTGATCCCGTTGCACC |
| | | | CGTTGAGCCGGTTGCTCCGGTTGGGCCGATCGGG |
| | | | CCAGTAACCCCTGTGGCTCCCGTTATCCCCGTTG |
| | | | CCCCAGTCACTCCAGTTGATCCGGTTACACCAGT |
| | | | TGGACCCGTTTCTCCCGTTGAGCCCGTTGCTCCG |
| | | | GTTGTTCCTGTAATTCCAGTTGGGCCCGTTACAC |
| | | | CAGTTGGACCGATCTCTCCCATTGGCCCGGTTTC |
| | | | TCCTGTTGAACCAGTTGAACCAGTTGACCCTGTT |
| | | | GCTCCGGTTGGGCCTGTTCTACCAGCTGAGCCTG |
| | | | TTACTCCCGTCGACCCGGTTACTCCAGTTGGACC |
| | | | GGTCGAGCCGGTTGGGCCGGTTGCTCCAGTTGAA |
| | | | CCGGTCGATCCCGTGACCCCCGTCGGGCCAGTCA |
| | | | CACCAGTTGCTCCGGTTATGCCCGTGGCGCCCGT |
| | | | TGCGCCGGTTGATCCGGTCGCACCAATTGAGCCT |
| | | | GTCAATCCAGTTGGACCAGTCACTCCGTCTTGGC |
| | | | CAGTAACCCCGGTTGCCCCTGTTACTCCCGTCGA |
| | | | CCCGGTTACTCCAGTTGGACCAGTTACTCCAGTC |
| | | | GGGCCGGATGCACCCGTTGATCCTGTGACTCCTG |
| | | | TCGCTCCTGTTGTACCAGTTGAGCCGGTTGTACC |
| | | | TGTGGCTCCGGTTGAACCAGTTCCTCCGGTCACT |
| | | | CCTCTTGGTCCGGTTACTCCTGTGGGGCCCGTCA |
| | | | CTCCTGTGGGACCTGTAATTCCCGTTACGCCAGG |
| | | | TTCACCCCCGGTTTGCGCCAATGAAACATCGTCT |
| | | | ATTAAAATCGTGCCGGTAGAAACTTTACTTAATA |
| | | | CAATGACGGCAGAGGCCGCGCCAGAAGGCACACT |
| | | | GCTTGTTTTATAG |
| Seq. | restriction endonuclease | B. velezensis | ATGTTAAATGATTATATAAAGCCCAGTATTTTAT |
| ID. 60 | subunit S - gene | | GGACAGATGTAGAGGATAGAATAGATGCAACCTT |
| | | | TTATCGGACGGACTTTGTAGTGAGTCTTGATAAG |
| | | | ATATTTAAGAATTTAACTATTCCTGTGTTGCCTA |
| | | | ATAGGCAGTTGATACATGAATTAACAGATTATAC |
| | | | TGCAAATGGAAGTTTTGAATCATTGAAAAAAAAT |
| | | | GTCAGATATACAAATGAAGCAGGAATACCTATGA |
| | | | TTAGGGGTAAAAATTTGAAGAATGGTGTTTTAGA |
| | | | TAAAACTGATCTCAATTACGTCACAGATGATACA |
| | | | TATAGATTCTTGAAAAAAAGTGAATTAAACGCAG |
| | | | GTGACCTATTATTTACAAAAACTGGAACCCTCGG |
| | | | GAATACTATTGTTTGGTCTGAGTATTTCGGAAAG |
| | | | GCAACGTTAGGTGACAATATATTTAAAGTTAGAT |
| | | | ATAAAAATGGAATCAACCCTTATTATATTCATGC |
| | | | GTATTTTTCTACTGATTATGGCTATAAATGGGTA |
| | | | GAAAGATTTGCACAAGGTGGGGTGCAACCAACTA |
| | | | TTATTTTAGCATTAGTTAAGTCAGAAATTTCGGC |
| | | | TGAGCCTTTGGTAATTCCTCTGCCTAACACTTCT |
| | | | GATCCTTTATAG |
| Seq. | N-6 DNA methylase - gene | B. velezensis | ATGCAAGCATTAATTGAAGAGTTAAAAGAACAAC |
| ID. 61 | | | TCATGATGAAGGGGTATAGTACATTTTCTGGACC |
| | | | AGAAACACATGAAGAAGATGGCACAACGATTTTT |
| | | | TTAGCTAGTGGTGATGAAAAAATTGTTTATGTAA |
| | | | AGGTATTTGACAAAGGAGCAGATTTATCTTTTGA |
| | | | AGTGCAAGATGCTGCTTTAATAGAGGCGCAGTAT |
| | | | CATGAAGAGGCTCCGGATTTCATTTGGGCATCAA |
| | | | ATGGTGAAGTGAATTATTACGCTGACTGTATTGA |
| | | | GTCAGATCCACTGGCAGAAATACCGGCCGTTATT |
| | | | GATGTAACAAAAAAAGAAAAACGACAAATTTCTA |
| | | | AACAAGAAGAATGGTCAAGAAAGATGTACTCTAC |
| | | | TCTTCAAAAGCGATTTGATGATTTGCATGAGCGC |
| | | | TTATATGGACCGGGTGGTGCTGATAATATCAGCA |
| | | | GTACGAACGAAGCCATTGATGAATTAAGTAAGTT |
| | | | GCTTTTTATGGAGACTTTCCGCTTGTATCATCCA |
| | | | GACTATGTATTAAGAGAAGGAGAAAATGCAGGTC |
| | | | TGCGAATTTTGGATATTTTAAAGTATCAATACAT |
| | | | AAAAGAGAATGGAAAAGAGGCTGTTAGGCAAATT |
| | | | CGTGATGCTTTTAAAGAAATAAAAAACCATGAGG |
| | | | ATTATGTTGCGGTAAATGATCTTGGTGAAGAATG |
| | | | TTTTATTTTCAGTGAAGATGAATACATTCGTTTA |
| | | | GAAAATCCCGCTAACTTTATTGCTGCTTTTGAAA |
| | | | CGTTTCAGGAATTAGATGATTTTGAAGATGAAAA |
| | | | TGGAAACCGAGTGAAAGCCACATTGAAAAATGTC |
| | | | AGTGCGGATATTCTAGGGCGTTTATTCGATGTAT |
| | | | TGATGCGTGGTAAATATGATAATAAAATTGGTCA |
| | | | AGCTACTTACTTAACACCGAGACAAGTAACTGAA |
| | | | GCAATGATTGAAATGGTTGTGCATGATTTAACAT |
| | | | CTAACCCAAAAGAAGCATCAAAATTAATCACAGC |
| | | | TGATGAAAAAGGTATTCCTACATTTAGAATGGGT |
| | | | GACATAACTTGCGGCTCCGGTGGATTCTTAATAA |
| | | | AAGGTTATGAAGCAGTAAAAAAATATATGCTCAC |
| | | | CCAGTTTACGGGAACGATGAAAGAAAAAATGGAG |
| | | | AAGCATTTTGAACTTATGAAAGAACATAGCTTTG |
| | | | TTGGAGCAGATAAGACACGAAACATGGTATTAAA |
| | | | AGCACGCTTAAATATGGCGATGCATGGATTACCA |
| | | | AAAGCGCCAATTTTCTGGGTAAATGATTCATTAA |
| | | | TGACTGAATCATTAAAACCGAAGAGTTTTGATTT |
| | | | AATAGTTACAAACCCACCTTTTAAATCAGGATCA |
| | | | GTTTCAAGTAAAACTGATGAGGGGAAAGCTATAT |
| | | | TAGAACGCTATAGCGAGGGAATTGACGAAACAGG |
| | | | CAAACCTAAAAAAGAGGGTCTTTGCTTAGGTGCA |
| | | | AAACCTAATCCAAAAGGGATTTGGAAAGAAGTAA |
| | | | GTTCGACAGACCAAGCAGTTTTGTTTATTGACCG |
| | | | TAACTTACAGTTGTTAAAGGATGGGGGACAATTA |
| | | | ATAATCGTCTTACCAGATGGGATATTGAGTAACT |
| | | | CAGGTTACAAACACGTAAGGGAATATTTAATGGG |
| | | | TAAAAAAAATGAAGTAACAGGTGAGTTTGAAGGA |
| | | | GGTAAGGGGATAGTTAAGGCTGTAGTTTCACTCC |
| | | | CGACAGTAACATTCCAATTATCAGGAACCGGAGC |
| | | | AAAAACATCTTTTCTATATATTAAGAAAAAAGAA |
| | | | CATGAAAATGAAAAACAAGGTCCTGTATTCATGG |
| | | | CAGTGGCAGAGGAAATTGGGTTTGATGTGAAAAA |
| | | | TAAAATAGAAGTTCAGCTGGGGAATGATCGGAAT |
| | | | GATTTATTGAAGATTGTTGATGTTTATAAAAAGG |
| | | | GAGTTAATTAG |
| Seq. | hypothetical protein - | B. velezensis | ATGAGATTGATATTACATGAATACCTAACCATAC |
| ID. 62 | gene | | CAAAAACAACAGAACAATTAGTGAACATTGCAAA |
| | | | AGAACATGGATTGAATTGGAATGAGGAACAAGTA |
| | | | AAATTATATTGCTTGCTTGATCCCTCTATATATG |
| | | | AAACAGAATCAGGTCAATGGGCTGTTAAGGTTGA |
| | | | TGACCGTCGTCATACCATATTAGGAGCAATTGAA |
| | | | AAAGCATTAGAAAAACGGCCGATGACTAAGATTG |
| | | | ACCCCAATATTATTGAACAGTTACCGAGTGATAT |
| | | | GATTGTGCCTCATAATGAGGTTATTGAAGTAGCT |
| | | | GTTAGTACAGGGCGTTATGAATCACCGAGAGAGA |
| | | | ATATTATTCGCGTGAAACGAAAATAA |
| Seq. | class III lanthipeptide - | B. velezensis | ATGAAAGAGGTGCTAGTACTTCAACAATTTGATG |
| ID. 63 | gene | | AAAAGTCTGAAGTAGAGCCTACGGCATGGACTGT |
| | | | TACTCTAACAACTATTTCAGTTACATTATCTACC |
| | | | CTTAGCAATCATTGCTAA |
| Seq. | class III lanthionine | B. velezensis | ATGGACAAAAAATTAGTTTATTTCCAACACATGA |
| ID. 64 | synthetase LanKC - gene | | GTGAAGATTCAAAATACTATATAGAGAAAAGCCC |
| | | | AAATGCGGAGACTGATCCATACGAAGTACATAAT |
| | | | ATCCCGAATCACTATACTGTTAGTACAGAATATA |
| | | | AATCACCGTGGAAGTTTTATAATAATCCAAATCA |
| | | | TAACCTTAAAGAACAAGGCTGGAAAATACACGTA |
| | | | AGTGCGACAATGAATAATGCTCAGGATATATTGA |
| | | | AAGTTGTAAGTCAAATTATGTTCAAACATCAGAT |
| | | | CCCATTTAAACATATTAAAGATAAACAATCTCTA |
| | | | TTTAATATGAATTCAAAGCATGGTAATCGAACTT |
| | | | CATCTGGAAAATTTATCGCTATATATCCTTCCTC |
| | | | TAATAACATGTTCTTCGATTTATTAAATGAACTT |
| | | | TATGAAGAATTAAAACATTATGAGAATGGGCCAT |
| | | | ACATACTGAACGACAAATCGTGGAAGGATAGTAA |
| | | | TATATATTACCGATACGGTGCATTTAAGAATATT |
| | | | TACAATGAAAGAGGAGAACTTTGCATTAAAGACG |
| | | | AAAACGGAAATTTAATTCCAGATAATAGGAATCC |
| | | | ATATTATAAAATACCTGATTTCGTAAGTGATTTT |
| | | | GATCAGTTTTTAGATACCAAGAATAACTTATTAG |
| | | | ATACTCAAGATGTAAGTAATTTTAATGATTATGA |
| | | | GTTCCAAGGAGTCCTTAGGTTTAATAATGGTGGC |
| | | | GGTATATATACTGGAATAAGGAAATCAGATGGAA |
| | | | AAAAAGTAGTAATCAAAGAAGGAAGACCTAAAGT |
| | | | AGGGTTAGATGGTCAATATAATGATGCAATTGAT |
| | | | AGATTGAATATAGAATACGAAGCATTAAATAAAC |
| | | | TGACAGAAGTTGAAGGTGTTGTTAAAGCGCTTGA |
| | | | TTATTTTAAAGCGTGGAAGCATGTGTTTTTAGTT |
| | | | GAAGAGTTTGTAGAAGGTGTAACTCTTCAATCAT |
| | | | GGTGTGCAATCAATTATCCGTTCAACGTTGAGAC |
| | | | TGATAAAAACGAATACATTAGTAAGGTAAAAAAA |
| | | | ATAATTAACAGCTTGATAAAAGCAATTAAACTAA |
| | | | TGCATAGTAAAAATGTTGGTATGGGAGATTTGCA |
| | | | ACCCCAAAATATAATGATTACCCCTGAATTAAAT |
| | | | GTTAAGATTATTGATTTTGAGGCTGCTAGTGCTC |
| | | | TCTCTGAAGAAAATGGAGCGTTGCAAACAATTGG |
| | | | CTACACACATAAGAAAAATAAAAATCATAAGGAG |
| | | | CGAGATTGGTATGCACTAAAAAAAGTTTTAAGAT |
| | | | TTTGTATTCTGCCAATAGGTCCAGTTGTTGATAT |
| | | | AGAAGAAACTATAAAAAAGAAACATGATATGTGG |
| | | | ATAGAGGAGGAGTTTGGCAAAGATGTCTATCAAT |
| | | | ATGTTGTAAACACAGAAAATCTATGCGACAAATA |
| | | | CTTATCTGATACCAAAGAAAAGAGATTCAACAAT |
| | | | AATTATGACAGTAAAATACAAAAAGAAATGGACA |
| | | | TGTCAAAAATTATTAAAGGATTGAGAAAAAATAT |
| | | | AGAGAGTAATATTTTACCCAATAGCTCGCTAATT |
| | | | CATGGCGATGTACGCCAATTTGTAATGCCATCTG |
| | | | GAAAGTTAAATGTACTAACTGGAGGAACTGGAGC |
| | | | TGCATTGGCATTGTACAGATCTGGAAACATCAAC |
| | | | AAGCGAGTTCAGGATTGGATTGAGATTGTTTTAC |
| | | | TTGAAAATTTGAATGTACTTAATGATGATATTGG |
| | | | GTTATTTACAGGAAAAGCTGGTATCGCAGTCACA |
| | | | TTGTATGAATTGGGATACACAGAGCAAGCTGTGG |
| | | | ACATATTCAATAATCTGTCATATGAAGATATGAA |
| | | | AGATATTTCATTAAGGTCAGGACTGTCGGGAATA |
| | | | GGTCTATCACTAATTAGCTTATACTTGGAAGAAA |
| | | | ATAATGATGATCTTTTGGTTACTTCTGAAAAAAT |
| | | | TGCTGATCAGATAGAAAATAGGATTATTGAAGAT |
| | | | GATGAATTATCAGTTACTGATTTTGCAGCAGTAC |
| | | | CTATAGGTTTGATTGATGGTTGGTCAGGAATATC |
| | | | TTTATTCTATGCGGCATTATATTCAGTCACTAAC |
| | | | AATGAAAAATATTATTTGAAATCAAAAGAATATA |
| | | | TTGAGCGAGATTTAAAACACTGTAAGGTAGATGA |
| | | | AGAGACGAATACTTTGCAAACTTATGATGATCAA |
| | | | AACCCTCGATTATTACCCTATTTATCTGGGGGAT |
| | | | CAATCGGAATAGGGATTGCTATTTGGTATTTAAA |
| | | | TTATGTAAGAGACACTAATTTATTTAGAGAAGAA |
| | | | TTAGAGCAAATAATCAATTTAAATAAAGTAAGGA |
| | | | TCGCATATAGCGGTGGATTGTTTGATGGGATCGG |
| | | | TAGTTTCTTGTTAATCCCGCCAATGACTAAGGAA |
| | | | AAAAACGAAATCAGTCAGCATATTGAGCTGGCAA |
| | | | TGAAAAAACTAGAATTGTTTCTTATCCGTAAAGA |
| | | | TGATCAAATATTATTCCCTGGGAATTTCAGTTTT |
| | | | CGTTTAGCCGATGATTACTACTCCGGAAGTGCCG |
| | | | GCATAATATTGGGCATAAACTCTATCCAGTTTTC |
| | | | AAATCCGTTATATTGGTTGCCAATAATAAAAATT |
| | | | GATAGTTTCTTAAGAAAGACTAAAAAAGAATTGT |
| | | | TATTAAATAATTAA |
| Seq. | ABC transporter ATP-binding | B. velezensis | ATGATGACCAGCCCAAAATTTAAATCGATAGAGT |
| ID. 65 | protein (closest BLAST | | TTTTCTTCTTACTGAGAAAAACCAGACCGAATAT |
| | homolog; 100% alignment | | AAGACTATTTATATTGGCAATATTTTTAAGTGGA |
| | coverage; 96% sequence | | TTAAGCGCAATAGCTTCTACCCTAGTGCCTCATT |
| | identity; B. vallismortis) | | ATTTAAAAAGTCTAATAGACAATTATAATATTCT |
| | | | TGATAAGATCAATTTGCGGGATCTTTTAGGACTA |
| | | | TTAGGGATATTTTTGAGTAGCGGAATAATTGGAG |
| | | | CAGTTGGTAGTTATATGTTAAGTGTAGTAGGATA |
| | | | TAATGTTGTCGCAAATCTCAGAAATTTATTATGG |
| | | | GAAAAGATAGTTATACTACCTGTAGAGTTTTACG |
| | | | ATAAGAATCGTTCTGCGGACATAGCAAGTAGATT |
| | | | TGTTAATGATACTACGGTGATTTATAACTTAGTA |
| | | | AGTAACTCTTTTTCGCAATTTATCAATGCTATAT |
| | | | TAATAGTGCTTTTTTGTGGATTTTGGTTATTTTA |
| | | | CTATGATTGGCAATTGACACTAGTGATTATAGTA |
| | | | GCAATTCCAATTTATTTGTTGATTTTTATACCTT |
| | | | TAGGAAGAATTTTATCTAAATTATCTAAAATGAC |
| | | | ACAAAGCTTAACAGGAAAATTAAATGTAAGAGCT |
| | | | GTTGAAACAATATCCTCAATAAGACTAATTAAAT |
| | | | CTTCAACTGCAGAAAAACTACAAGTGGAAAAAGG |
| | | | AAGAGATGATATTGAAGCTTTAAGAAACATAGGC |
| | | | CTAAGGCAGACAAAATGGATGGTTATTTTAAACC |
| | | | CTATCATTAATTTAATGATGATGCTTATCATTAT |
| | | | CAGCATCATTGGATTCGGAGGGGTTAAATTAGCC |
| | | | AATGGAAGTTTATCGCCAGGAACGTTTATAGCAT |
| | | | TTCTAACCCTTATGTTCTATATCATAGGTCCACT |
| | | | TAATAATTTGGGGCTATTCTTTACTCAAATACAA |
| | | | AAGACGATAGGTGCAACAGAAAGAATTTCGCAAT |
| | | | TGATATATGAGCAAGGAGAAGATCAGCATAAAGG |
| | | | AAAAGAATTAGCGGAAACCTATAAAGATCTAGTG |
| | | | ATTGAAAATTTATCATTTTGCTATGGTAAAGAGG |
| | | | ATAAAGCATTTTCCTTGAACAATATTAATTTAGT |
| | | | AATAAAAAGAGGAAGTGTTAATGCCTTAGTAGGT |
| | | | CCTAGTGGTAGTGGTAAAACCACAATCATCTCTA |
| | | | TTCTGGAAAGATACTACAAGCCGAATAGCGGAAG |
| | | | TATTTATTTTGGTGAAGAGAATATTGAGTTATAT |
| | | | TCATTAAAATCATGGCGTAGCCAAATAGGATATG |
| | | | TAGCTCAGAATCATGATTTAATAAGCGGTACTGT |
| | | | TAGAGACAATCTCATCTTTGGTTTAGAAAATACC |
| | | | CCAAATGAAAACAGAATAGTGGAAGCATGTAAGA |
| | | | AGGCATATGCATGGCAATTTATAAGTGAATTACC |
| | | | TAACAGTTTAGAAACTAATATTGGAGAAAAAGGT |
| | | | CTGAATTTATCAGGGGGACAACGACAAAGAATTG |
| | | | CTATTGCGAGAATGTTTCTGAAGAATCCAAATAT |
| | | | AATCTTTTTGGATGAAGCCACTGCTAGTCTTGAC |
| | | | AGTCATTCTGAACAAATTGTGAACGAAGCAATGA |
| | | | AGAAGCTCATGAAGGATAGAACCGCTATTATAAT |
| | | | AGCACATAGGTTATCCACTATTATAAACGCTGAC |
| | | | AATATCATTTTTATGGAAAACGGTGAGGTAACAG |
| | | | GCCAAGGGAATCATTGGGAGTTAAAGCGCAGTCA |
| | | | TAAATTGTATCATCAATTCTGTGAGCAGCAGTTT |
| | | | AAAGAAGATAGTACCGATCCATTAGTATTAACCA |
| | | | ATTAA |
| Seq. | S8 family serine peptidase - | B. velezensis | ATGAAGAATTTAAGAAGAATTTCGATGGTTTTCA |
| ID. 66 | gene | | TACTTTTATTTGTATCCAGCTTGCAACCTATTAG |
| | | | CTCTCATGCTGAAGAATCAAATTATGATGAATCT |
| | | | ATCATAATTAACCTCGACTCAAAAGTAAGTGAAT |
| | | | CGACAATAAACAAGGTTAAGGATAGGTATTCCAA |
| | | | TATAGGAACAAACTATATTAAAGAATTAGATTTA |
| | | | TTGGTAATAGATAATATAAAACCAAGCCAATTTT |
| | | | CAGCAATCAAAGATATTGCTAAAGAAAAATTAGA |
| | | | CGCAAAAGAAATTATTGAGGATAAAGAGATTTCT |
| | | | CTTCCTAGTAAACAGCTATCTTCTAAATTGGCAA |
| | | | TTTCATCACAATTCACAGAAGATAACGACACTCT |
| | | | TTATGACAGTTGGTTATGGAATATCAAGCAAGTA |
| | | | ACAAATGATTATCGAAGTTATCGTATAAATAAAG |
| | | | GATCTCATAATACAAAAGTAGGAGTAATCGATTC |
| | | | AGGCATAGATTTCAATCATCCAGACCTCAAAAAT |
| | | | AATATTGTAGATACTGGAGAGTCTTTTGTTCCAG |
| | | | TTGAAGATAATACACAAGACTTTTATGGGCATGG |
| | | | AACTTCTGTGGCTGGGATAATTGCTGCTAACGGG |
| | | | GATGTAAAAGGAGTTGGACCAAATCTTGGTTTAG |
| | | | TGCCTTATAAAGTATTCGATAAAAATGGTAAATC |
| | | | TAAAACTAGCTGGGTTATAAGCGCAATTGTTAAA |
| | | | GCTACGGAAGATGATATGGACGTAATTAATTTAA |
| | | | GTTTATCTACTTTCTTATCAAAAAAAGATAAAGA |
| | | | AGATAGAGAGACTATAAAACTTTTTGAAAAAGCT |
| | | | TTTAAATTCGCTAGAAAACACAATACTTTAATTG |
| | | | TTGCAGCAGCTGGAAACCATGGATATGATATTTC |
| | | | AAATTCAAAAAAACTTGCACAACAACTAGGTAAA |
| | | | CCAAAGGACAATATCCTACTTCTTCCTGGTGGAG |
| | | | ATAACGATGTAATTACTGTATCTGCCACCACAGC |
| | | | ACAAAATACAAAAGCTTCCTACTCAAATTACGGG |
| | | | AAAACCATCTCGATTGCAGCTCCAGGTGGTGATC |
| | | | TTGACCCAAGTTTTTTGGATACAAATAAGGTTGA |
| | | | TCTATATAGCTTGGTATGGACTACTTCCCCTGTA |
| | | | AATATCCCGCAAACTCCGCTAAGTAAGTCACTGG |
| | | | GCTTTCAAAAGGGATATGAACCTACTTTAGGGAC |
| | | | AAGTGTAGCAGCTCCAATAGTAACTGCTACAGCA |
| | | | GCCCTATTAAAAACAGAATACTACGAAAAATACG |
| | | | GAGTGGAGATGTCAAATCGCAAAGTTGAGAAAAA |
| | | | CTTATATCAAAACACAGACCACTTTGAAAACTTA |
| | | | AATAAGAATGAAGTAGGTAGCGGTATCGTAAATG |
| | | | CTTACGAATCTTTGCTTAATATTGAGAGATAA |
| Seq. | class III - gene | B. velezensis | ATGAATAACGTATTAGCATTACAACAATTAAATA |
| ID. 67 | | | AAAGTGCTGAGGTGGAACCGCAAGTGGGACCAAC |
| | | | GATAACAACTATTACAGTAATACCTACAATGGTT |
| | | | ATATCCTTAATAAGCAATTATTGTGACAATCATG |
| | | | CTTCATAA |
| Seq. | class III lanthipeptide - | B. velezensis | ATGAGAGATGTATTGGAACTTCAACAACTGAATG |
| ID. 68 | gene | | AAGGAACTGAAGTAGAAGCTTCAAAAGGCAAAGG |
| | | | CGGCTTACTTACACTGATCACAACGGTAGTGGGC |
| | | | ACATCTACTATTAGCAACAACTGCGGATAA |

3. In Vitro Inhibition of E. amylovora (CM1) Growth in Solid Dual-Plate Assay and Antibiogram

[0087] In an embodiment, dual-culture inhibition plate assays were tested in KB agar plates. Single colonies from CM1 and the two Bacillus strains, I21 and Commercial (I16), were incubated overnight in KB liquid media with linear shaking at 28° C. The bacterial concentration of each isolate was verified by OD₆₀₀. The E. amylovora (CM1) inoculum was adjusted to OD₆₀₀=0.1 and 100 μL of the inoculum were spread onto KB agar plates. The plates were allowed to dry for 20 min after which 10 μL of each Bacillus strain with an OD₆₀₀=0.5 were spotted on top of the inoculated pathogen. In the case of the antibiogram, the procedure was as above antibiotic discs embedded in 15 μl of different Streptomycin concentrations (50, 100, 500, 2500 and 1000 μg/ml) and placed. Data collection was also performed 2 days post inoculation (2 DPI). FIG. 2 shows the inhibition assay results based on dual-culture of CM1 with I21 and Commercial (I16). I21 displayed significantly greater in vitro inhibition efficiency than Commercial (I16) as quantified in FIG. 2.

[0088] In an embodiment, dual-plate inhibition assays were also performed with two E. amylovora reference strains with Serenade ASO (used as control) and 121. This was essential to display that the 121

[0089] B. velezensis is active against different E. amylovora strains including those isolated from different countries and different plant species. As can be seen from FIG. 3, inhibition of E. amylovora CFBP 1430 (a virulent strain isolated in France/Belgium from a Crataegus sp plant; (Paulin, 1973) and E. amylovora Ea273 (ATCC 49946; a virulent strain isolated from an infected apple tree in New York State; (Sebeihia, 2010) was observed for Commercial (I16) (left panel) and I21 (right panel).

[0090] FIG. 4 presents the antibiogram of different E. amylovora strains with streptomycin, a potent antibiotic. Whilst E. amylovora CFBP 1430 and E. amylovora Ea273 (ATCC 49946) were highly susceptible towards the antibiotic effect, E. amylovora CM1, the Portuguese isolate from Campo Maior was completely resistant. This displays that the I21 B. velezensis strain is surprisingly active against a strain of E. amylovora that is highly resistant to strong antibiotics.

4. In Vitro Inhibition of E. amylovora (CM1) Growth in Liquid Dual-Plate Assay.

[0091] In an embodiment, E. amylovora (CM1) was electroporated using a described protocol (Spinelli, 2005) and transformants were selected in KB agar supplemented with tetracycline (10 μg/ml). A transformation efficiency of 1.18×10⁴ CFU/μg was obtained. E. amylovora (CM1) was transformed with pHC60 a broad host range plasmid (Cheng et al., 1998) that constitutively expresses GFP. To prepare CM1 competent cells, the bacterium was grown in LB overnight at 28° C. with linear shaking at 120 rpm. The culture was diluted to an OD₆₀₀ of 0.1 with fresh LB. When the OD₆₀₀ reached 0.8, cells were kept on ice for 20 min. A volume of 12 mL was centrifuged at 8,000×g for 5 min at 4° C. and the supernatant discarded. The pellet was washed in the same original volume with ice-cold sterile MilliQ water. The resuspended pellet was centrifuged at 8,000×g for 5 min and the procedure repeated twice, decreasing the water volume by half. Finally, the pellet re-suspended in 250 μl of ice-cold sterile MilliQ water. The transformation was performed using 100 μL of the electrocompetent cells. The plasmid DNA was purified with NZYGelpure kit and 550 ng were used for the transformation. A 2 mm gap electroporation cuvette was used on a Gene Pulser Xcell™ Electroporation System (BIORAD, Amadora) with a pulse of 800 Ohms, 2.5 kV and 2.5 pFD. The recovery was done by immediately adding 1 ml of SOC medium followed by incubation at 28° C. with minimal shaking for 1 hr. Transformed bacteria was spread on LB agar plates supplemented with 10 μg/mL tetracycline. One day after incubation, positive transformants were confirmed by PCR using the same program set up for 16S rRNA amplification but with the alternative primers M13Fw/M13Rev (M13Fw-CACGACGTTGTAAAACGACGGCCAGTG (SEQ ID No. 71); M13Rev-GTGAGCGGATAACAATTTCACACAGG (SEQ ID No. 72)), targeting the GFP expression plasmid. GFP expression was confirmed observing the colonies under a UV transilluminator and fluorescent light microscope. E amylovora (CM1) transformed with GFP is herein termed CM1GFP The in vitro dual liquid culture inhibition assay between CM1 and I21 was set up in 96-well plates, with a total volume of 200 μl in KB media. E. amylovora (CM1) OD₆₀₀ was grown overnight in KB and an exponential growing culture was diluted to OD₆₀₀ 0.01. Several InPP (I21) OD₆₀₀ were tested, namely 0.1, 0.05, 0.001, 0.0005, 0.0001 and 0 (control). Each condition was repeated in triplicate. CM1GFP growth was assessed by fluorescence measurement at 488 nm every 30 min, during 24 h using a BioTek Synergy HTX plate reader. FIG. 2 shows inhibition assay results based on dual-culture of CM1 with I21 and Commercial (I16).

### 5. Indole-Acetic-Acid (IAA) Production

[0092] Auxins are hormones that enhance plant root growth, hence improving crop growth and productivity. Microbes that produce auxin can help plants improve biotic and abiotic stress tolerance. FIG. 5 shows the quantification of auxin production of I21 and Commercial (I16). In an embodiment, the methodology used for auxin quantification was an adapted colorimetric procedure (Gilbert, 2018). Commercial (I16) and I21 were incubated in liquid Luria Broth (LB) media at 28° C. with 180 rpm during 16 h. The OD₆₀₀ was then adjusted to 0.05 and the inoculum supplemented with L-tryptophan (5 mg/mL). A volume of 200 μL of inoculum was added onto a 96-well plate and incubated at 28° C. with 180 rpm for 24 h. Cultures were centrifuged at 3,000 rpm for 30 min and 100 μL of supernatant were transferred into a fresh 96-well plate. A 1:1 (v/v) solution of Salkowski's reagent (34.3% (v/v) perchloric acid and 10 mM FeCl₃) was added to each well and the plate incubated for 30 min at room temperature and protected from light. The change in colour was recorded at 530 nm in a spectrophotometer. An indole-acetic-acid (IAA) standard curve was produced in a range of (1-0 μg/mL). Sterile LB supplemented with 5 mg/mL L-tryptophan was used as control and its relative IAA concentration was subtracted from those obtained for both bacterial isolates. The amount of IAA produced was obtained by comparison with the IAA standard curve. Commercial (I16) was used as positive control for IAA production.

### 6. 1-Aminocyclopropane-1-Carboxylic Acid (ACC) Deaminase Activity.

[0093] Ethylene is a hormone that mediates plant response to environmental stressors. However, when produced above a certain threshold, ethylene hinders plant growth and development. Bacteria that produce 1-aminocyclopropane-1-carboxylate deaminase (ACCd), an enzyme that breaks down an intermediate of ethylene, have the ability to ameliorate the deleterious effects of environmental stressors. FIG. 6 shows the quantification of ACC deaminase activity of I21 compared with the Commercial (I16). The qualitative assessment of ACC deaminase activity was based on previously developed methodology (Penrose, 2003). Commercial (I16) and I21 were incubated at 28° C., 180 rpm in liquid LB for 16 h. Pre-inoculums were adjusted to an OD₆₀₀ of 0.05 in minimal nutrient medium M9 using ACC as sole nitrogen and carbon source (22 mM KH₂PO₄, 33.7 mM Na₂HPO₄, 9.35 mM NH₄Cl, 8.55 mM NaCl, 1 mM MgSO₄, 0.3 mM CaCl₂) and 3 mM ACC). A volume of 100 μL of each inoculum was added to a 96-well plate and incubated for 48 h. Bacterial growth indicates ACCd activity and was recorded by spectrophotometric measurement at 600 nm (OD₆₀₀). Commercial (I16) was used as positive control. A blank control was also used to normalise the data. Bacterial growth, as measured by an increase in optical density measurement at 600 nm over time, is considered to confirm ACC deaminase activity.

### 7. Catalase Activity.

[0094] Catalase is an enzyme that helps in the breakdown of hydrogen peroxide (H₂O₂), a toxic compound that can damage cells by producing reactive oxygen species (ROS), into water and oxygen. Bacteria producing catalase are well adapted to harsh environments since they can detoxify their environment by breaking down the H₂O₂ produced by pathogen bacteria, not only protecting themselves and other organisms from its harmful effects but also causing the inhibition of the pathogen's growth and reduction of their virulence. Besides they can also help to promote plant growth. In an embodiment, qualitative catalase activity was evaluated by adding fresh single colonies of 121, Commercial (I16) and a bacterial negative control from an LB agar plate onto a solution of 3% (v/v) hydrogen peroxide on a sterile slide (Hansen, 1978). Oxygen release by means of effervescence indicates positive catalase activity as shown (FIG. 7) for I21 and to a lesser extent for Commercial (I16).

8. E. amylovora Infectivity in Detached Pear Assays.

[0095] In an embodiment, Portuguese Rocha immature pears of caliber 55/60 mm were used as hosts to test the biological control capacity of I21 against E. amylovora (CM1GFP) infection. Two inoculation tests were performed according to a previously descried procedure (Donat, 2005) with some modifications. E. amylovora (CM1GFP) was grown in liquid LB media with linear shaking at 120 rpm for 48 h. The growth was assessed by means of OD₆₀₀ measurement. The bacterial cells were centrifuged at 5,000×g for 5 min and the pellet resuspended to 10⁹ CFU/mL in 1× phosphate buffered saline (PBS, pH=7.4) which corresponds approximately to an OD₆₀₀ of 1. The Bacillus strains were freshly grown from a single colony in LB media to OD₆₀₀ of 1, pelleted as above and re-suspended to an OD₆₀₀ of 1 in 1×PBS. Just before inoculation, the immature pears were surface sterilised by sequential submersion in 10% (v/v) bleach for 2 min, sterile distilled water for 2 min, then sprayed with 70% (v/v) ethanol and air dried in a sterile hood for 5 min. The pears were pierced with a needleless syringe in three vertices of a triangle to create inoculation holes which were filled at the incision site with 20 μl bacterial solutions containing a 1:1 mixture of combinations of E. amylovora (CM1GFP) and each Bacillus strain and the respective controls of each Bacillus strain and PBS, and E. amylovora (CM1GFP) and PBS. The bacterial solutions were allowed to penetrate into the holes for 5 min, after which the pears were placed on wet filter paper in a plastic container to maintain a humid environment and kept at 25° C. for 5-7 days. Each experimental group contained 6 pears and experiments were repeated three times. Images of pears from all groups are displayed in FIGS. 8 and 9.

[0096] In the in vitro dual plate assay in solid media, CM1 inhibition halo is twice the size in the presence of I21 B. velezensis when compared to the Commercial (I16) (FIG. 2, Panels A and B). In the in vitro assay in liquid media CM1 was inhibited by I21 by around 50% at an OD₆₀₀ as low as 0.001, whereas at OD₆₀₀ of 0.1 there is almost complete inhibition (FIG. 2, Panel C).

[0097] In an embodiment, I21 displayed a higher capacity to produce the hormone auxin, known to improve plant biotic and abiotic stress tolerance that helps plant development, than the Commercial (I16) (FIG. 5).

[0098] In an embodiment, the disclosed I21 strain, like Commercial (I16), displayed deaminase activity (FIG. 6).

[0099] In an embodiment, I21 showed higher catalase activity than Commercial (I16) as observed by stronger bubble production resulting from higher release of oxygen (FIG. 7). This result suggests that I21 has greater chance of survival in harsh environments because of its inherent capacity for auto-protection against oxidative stress than the Commercial sample (I16).

[0100] In detached pear infectivity assays, I21 and Commercial (I16) were tested as potential biological control agents against E. amylovora (CM1-GFP) causing fire blight in fruit (FIGS. 8 and 9). When CM1GFP was inoculated alone, typical fire blight disease symptoms were observed, soon after infection the skin turning slightly off-colour and quickly turning to brown. However, when InPP (I21), at an OD₆₀₀ of 0.1, was co-inoculated with CM1GFP, the symptoms observed were clearly less severe than CM1GFP alone. This reduction in disease symptoms is clearly more substantial than that observed for treatment with Commercial (I16) at the same OD. These results were further corroborated by observation of the pear slices under UV light on a stereomicroscope, in which there was a very clear reduction of CM1GFP expression in pears treated with 121+CM1GFP in comparison to either CM1GFP alone or I16+CM1GFP. Together, these results demonstrate that surprisingly in detached pear assays, the disclosed I21 has a stronger capacity to reduce E. amylovora growth and fire blight symptoms than Commercial (I16).

9. I21 B. velezensis Suspension Concentrate Formulation.

[0101] In an embodiment, to an aqueous solution of sodium chloride (0.9% w/v, 80 mL) at room temperature it was added an aqueous solution of alginate (3% w/v, 53 mL) followed by Silwett-77 (0.2 mL), with stirring. A pellet of I21 (2.04×10⁹ CFU/mL) was suspended in LB medium (27 mL) that was added to aqueous solution of sodium chloride (0.9% w/v, 133 mL). This mixture was added to the initial alginate-containing solution with gentle agitation and diluted with water to a final volume of 15-16 L, resulting in the I21 B. velezensis formulation.

### 10. Alginate Microparticles.

[0102] In an embodiment, an aqueous solution of sodium alginate (0.5% w/v, 5 mL) was sprayed onto an aqueous solution of calcium chloride (CaCl₂)) (20% w/v, 14 mL) and tween 80 (15 μL) with continuous agitation at 200 rpm at room temperature, in aliquots of 0.5 mL at the rate of 38 L/min. At the end of the process, excess CaCl₂) was eliminated and the pelleted microparticles (average size 50-100 μm) were recovered in 1 mL of deionized sterile water using a vortex.

11. Alginate Microparticles Loaded with I21 B. velezensis.

[0103] In an embodiment, a pellet of I21 at OD₆₀₀=0.6 (10⁸ CFU/mL, 3 mL) was suspended in 200 μL of deionized sterile water and the bacterial suspension was added to an aqueous solution of sodium alginate (0.5% w/v, 5 mL). The mix was sprayed as described above to produce microparticles loaded with bacteria by crosslinking with CaCl₂) (20%, 14 mL).

12. In Vitro Formulated I21 B. velezensis Efficacy Studies.
E. amylovora Growth Inhibition Assay

[0104] In an embodiment, E. amylovora was grown in LB medium at 28° C. with agitation at 180 rpm, then mixed with 50% (v/v) glycerol at a 1:1 ratio (v/v). E. amylovora stocks were kept frozen at −80° C.

[0105] In an embodiment, E. amylovora was transferred from the frozen stock to a Ø 90 mm plate of KB medium and grown overnight at 28° C. and re-streaked to a fresh KB petri-dish and grown for 48 h in the same conditions. The plates were kept at 4° C. for up to two weeks.

[0106] In an embodiment, E. amylovora was transferred from the 4° C. stock to LB medium and grown for several hours at 28° C. at 180 rpm. The OD₆₀₀ of the cultured I21 bacteria was adjusted to 0.01, from which 100 μL were spread onto KB agar Ø 90 mm plates and left to dry. A 10 μL drop of test-sample was pipetted into the centre of the plate and left to dry. The plate was sealed with parafilm and incubated for 3 days at 28° C. The plates were photographed and the inhibitory area quantified using image J software (java 1.8.0_172). Briefly, a scale was set considering the diameter of the petri dish (bottom plate), the total area comprising the test-sample and inhibition zone was highlighted, and automatically quantified in cm². The same was done for the area of the test-sample alone. The final inhibited area calculated as follows:

$$Inhibition ( {cm}^{2} ) = Total area ( inhibition zone area + test - sample growth area ) / Test - sample growth area .$$

[0107] The experiment was repeated as described above with the disclosed I21 strain initially cultured at an OD of 1.0.

[0108] Results are shown in FIG. 10A and FIG. 10B. As expected, neither the suspension concentrate formulation without I21 nor the unloaded alginate microcapsules alone, inhibited E. amylovora. However, the I21 suspension concentrate formulation and the I21-loaded alginate microcapsules showed a greater inhibition of E. amylovora than that of non-formulated I21 alone.

[0109] Another advantage of the I21 suspension concentrate formulation can be seen in FIG. 11. Over a 21-day period, under storage at 4° C. and protected from light, the viability of the formulated I21 is greater than that of the naked I21 at all timepoints tested.

13. Ex Vivo Microencapsulated I21 B. velezensis Efficacy Study in Pears

[0110] In an embodiment, for the evaluation of the I21 effect against E. amylovora in pears, as well as the formulations containing the bacterium, detached pear assays were performed. Plastic containers (30 cm×20 cm) were sterilized for 10 min under UV light. Immature pears caliber 55/60 mm (were washed for 2 min in 10% bleach, rinsed in distilled H₂O for 2 min and sterilized with 70% ethanol. In a flow chamber, 3 holes were made in each fruit with a needleless plastic syringe followed by the application of each treatment (10 μL per hole). Pears inoculated with the treatments were placed in the sterile container over a paper sheet moistened with 20 mL of sterile H₂O. Boxes were closed with parafilm and incubated for 24 h at 25° C. After this period 10 μL of CM1GFP E. amylovora in PBS (OD₆₀₀ nm=0.5) were added to each hole, the boxes closed with parafilm and incubated for 25° C. for 5 days. Pears were photographed and cut in slices so that the holes sections could be photographed under fluorescence stereomicroscope (Nikon). Images were taken of all 6 pears per experiment under the exact same magnification, zoom, camara and UV settings and were quantified using and automated macro on ImageJ.

[0111] Results are shown in FIG. 12. As expected, the unloaded alginate microcapsules alone exhibited little effect. However, the I21-loaded alginate microcapsules provided inhibition of E. amylovora greater than that of non-formulated I21 alone.

14. Ex Vivo Formulated I21 B. velezensis Efficacy Study in Pears.

[0112] In an embodiment, the same procedure as above was applied with formulated I21 and the results are displayed in FIG. 13. The formulated I21 provided inhibition of E. amylovora similar than that of non-formulated 121.

### 15. Spray-Drying Formulation of 121.

[0113] In an embodiment, bacteria was grown in LB medium, and a pellet was recuperated from 10 ml of inoculum at OD₆₀₀=0.6 (exponential phase), and after 48 h of growth (stationary phase) at 28° C. at 180 rpm. An aqueous solution of filtered MgSO₄ (10% w/v) was prepared and used to resuspend both pellets in a final volume of 100 mL each. The control consisted in 100 ml of bacteria grown in LB medium for 48 h and sprayed directly without pelleting. The initial bacterial concentration was determined using the spread plating technique for CFU counts by collecting 1 mL from each solution before spray drying (without affecting the final volume).

[0114] In an embodiment, a laboratory-scale Mini spray dryer was used and prepared by setting the inlet T° to 120° C., the outlet T° to 80° C., the feed rate of the pump at 10% (^{˜}3 mL/min), the air flow rate at 40 mm (^{˜}600 l/h), and the aspirator at 100%. Each sample was fed to the drying chamber and the final powder was collected with a spatula and transferred into a 15 mL falcon tube. The tube was weighed to assess the final yield, and samples were stored at 4° C. until use.

[0115] In an embodiment for bacterial quantification for viability results, spread plating technique for colony counts was performed for all treatments on nutrient agar (23 g/L) plates. 100 μl of multiple 10-fold serial dilutions were plated and the plates were kept for 48 hours in an incubator at 28° C. The colony counting was performed by choosing an appropriate dilution (between 10 and 50 colonies per plate) and the bacterial loss during the spray drying process was assessed in percentage using the following formula:

$$S = \frac{CFU counts in total recuperated grams of powder}{initial CFU counts of bacteria in the total sprayed volume} \times 100$$

[0116] In an embodiment, of the in vitro assay against E. amylovora, the spray-dried samples were stored at 4° C. for two months. All samples were rehydrated in PBS buffer 1× and were applied in a growth inhibition assay of E. amylovora in vitro as previously described. The control consisted in bacteria grown on the day of the experiment to an OD₆₀₀=1.2 (stationary phase of growth).

[0117] Results are presented in FIG. 14. Spray-dried formulations were particularly effective in vitro against growth of E. amylovora.

16. In Vitro Inhibition of M. oryzae Growth

[0118] In an embodiment, the in vitro antifungal activity of the naked I21 and formulated I21 was assessed on the basis of mycelial growth inhibition of M. oryzae isolate M22.7 (isolated and identified by PCR at InnovPlantProtect facilities). Briefly, actively growing M. orzyae was transferred with a 7 mm diameter cork-borer to potato-dextrose agar plates, distanced 5 mm from the extremity. M. oryzae was left to grow for 5 days at 25° C., and then 5 μl of naked I21 (collected at the exponential phase, OD 600=0.6) and I21-loaded alginate microparticles were incubated in the opposite extremity, also distanced 5 mm from the outer surface. The test-samples were left incubated at 25° C. for 7 days, and a negative control was included. Antifungal activity was defined by the area of M. oryzae growth, using imageJ software (java 1.8.0_172).

[0119] In an embodiment, I21 was tested against M. oryzae in naked and encapsulated forms. I21-loaded alginate microparticles displayed remarkable mycelial growth inhibitory capacity, being comparable to naked I21 (I21_0.01 and 121_0.001, FIG. 15). Thus, I21 activity is not compromised by the encapsulation process. Empty microparticles exhibited a non-statistically significant inhibitory effect. Furthermore, only the control and unloaded MP groups permitted further growth of M. orzyae between 4 and 7-days whilst all active-containing treatment groups were able to prevent further fungal expansion.

17. M. oryzae In Vitro Growth Inhibition by I21 B. velezensis by GFP Fluorescence Detection

[0120] In an embodiment, spore (conidia) from the GFP-expressing Portuguese isolate M. orzyae PR9GFP were harvested and tested at a concentration of 10³ spores/mL in a black, flat-bottom 96-well plate in the presence of I21 at three different OD₆₀₀ concentrations, in a 10% volume ratio of I21 cells per well. Fluorescent readings were taken for GFP signal (Excitation: 479 nm, Emission: 520 nm) and measurements were taken every 30 minutes for 72 h at 25° C., under continuous orbital shaking at 282 cycles per minute, using a Synergy H1 multi-well plate reader (BioTek).

[0121] As can be seen from FIG. 16, all concentrations of I21 were highly effective at inhibiting growth of M. orzyae with inhibition rates close to 100%.

18. M. oryzae Ex Vivo Growth Inhibition by I21 B. velezensis on Detached Presto Leaves.

[0122] In an embodiment, M. oryzae M22.7 cultures were grown on rice flour for 3 days in the dark and 3 days under constant light (50/50 white light and purple light). Spores were harvested by scraping the cultures with 0.02% Tween-20 and counting was done with a Neubauer chamber.

[0123] In an embodiment, rice leaves from 3 to 4-week old Presto plants were cut and sterilized with 70% EtOH and washed with sterile water. Fresh single colonies were grown in liquid LB media. 5 ml of inoculum was centrifuged at 5000 rpm for 10 min at room temperature and the pellet resuspended in the same initial volume of 1×PBS supplemented with 0.25% gelatin. Rice leaves were submerged into the bacterial solution and the surplus removed using a sterile filter paper. Submerged leaves were placed on 0.7% agar plates with 2 ppm 6-benzylaminopurine overnight in the dark. Next day, 2.5 μL of M22.7 at 10⁶ conidia/mL were spotted on top of the leaves. Wounds were made by pricking the inoculated points with a sterile needle. Leaves were placed overnight in the dark then incubated for 6/7 d with a 16 h/8 h photoperiod.

[0124] As can be observed from the data presented in FIG. 17, I21 was particularly effective at controlling blast disease symptoms caused by M. orzyae in this assay.

[0125] Taking the results from each of the experiments in the Examples recited above, it is now surprisingly possible to provide an efficacious, standalone formulation of a BPPA that confers superiority over an existing commercial product to control fire blight caused by the pathogen E. amylovora. The I21 B. velezensis strain disclosed herein according to the present invention may be used for control of additional plant diseases caused by other pathogens belonging to the Erwinia genus. Moreover, the I21 B. velezensis strain of the present disclosure allows for control of fire blight and to increase plant resistance by using I21 B. velezensis strain, therefore making an unexpected contribution to the safe and sustainable production of pome fruits and ornamental plants. Additionally, the disclosed I21 B. velezensis can also be used to control other plant diseases such as rice blast caused by the fungus M. oryzae. The B. velezensis (I21) strain disclosed herein according to the present invention may be used for control of additional plant diseases caused by other fungi besides those belonging to the Magnaporthe genus. Moreover, the present invention allows for control of rice blast and to increase plant resistance by using B. velezensis (I21) strain, therefore making an unexpected contribution to the safe and sustainable production of rice.

[0126] The term ‘comprising’ whenever used in this document is intended to indicate the presence of stated features, integers, steps or components, but not to preclude the presence or addition of one or more other features, integers, steps, components or groups thereof.

[0127] All references recited in this document are incorporated herein in their entirety by reference, as if each and every reference had been incorporated by reference individually.

[0128] Those skilled in the art will recognise or be able to ascertain using no more than routine experimentation, many equivalents to the specific embodiments of the invention described herein. The scope of the present invention is not intended to be limited to the above description, but rather is as set forth in the appended claims.

[0129] Where singular forms of elements or features are used in the specification of the claims, the plural form is also included, and vice-versa, if not specifically excluded. For example, the term ‘a bacterium’ or ‘the bacterium’ also includes the plural forms ‘bacteria’ or ‘the bacteria’, and vice versa. In the claims, articles such as ‘a’, ‘an’, and ‘the’ may mean one or more than one unless indicated to the contrary or otherwise evident from the context. Claims or descriptions that include ‘or’ between one or more members of a group are considered satisfied if one, more than one, or all the group members are present in, employed in or otherwise relevant to a given product or process unless indicated to the contrary or otherwise evident from the context. The invention includes embodiments in which exactly one member of the group is present in, employed in or otherwise relevant to a given product or process. The invention also included embodiments in which more than one or all of the group members are present in, employed in or otherwise relevant to a given product or process.

[0130] Furthermore, it is to be understood that the invention encompasses all variations, combinations and permutations in which one or more limitations, elements, clauses, descriptive terms, etc., from one or more of the claims or from relevant portions of the description is introduced into another claim. For example, any claim that is dependent on another claim can be modified to include one or more limitations found in any other claim that is dependent on the same base claim. Furthermore, when the claims recite a composition, it is to be understood that methods of using the composition for any of the purposes disclosed herein are included, and methods of making the composition according to any of the methods of making disclosed herein or other methods known in the art are included, unless otherwise indicated or unless it would be evident to one of ordinary skill in the art that a contradiction or inconsistency would arise.

[0131] Where ranges are given, endpoints are included. Furthermore, it is to be understood that unless otherwise indicated or otherwise evident from the context and/or the understanding of one of ordinary skill in the art, values that are expressed as ranges can assume any specific value within the stated ranges in different embodiments of the invention, to the tenth of the unit of the lower limit of the range, unless the context clearly dictates otherwise. It is also to be understood that unless otherwise indicated or otherwise evident from the context and/or the understanding of one of ordinary skill in the art, values that are expressed as ranges can assume any subrange within the given range, wherein the endpoints of the subrange are expressed to the same degree of accuracy as the tenth of the unit of the lower limit of the range.

[0132] In addition, it is to be understood that any particular embodiment of the present invention may be explicitly excluded from any one or all of the claims. Where ranges are given, any value within the range may be explicitly excluded from any one or all of the claims. Any embodiment, element, feature, application or aspect of the compositions and/or uses and methods of the invention can be excluded from any one or more of the claims. For purposes of brevity, all embodiments in which one or more elements, features, purposes or aspects are excluded are not set out forth explicitly herein.

[0133] The above-described embodiments are combinable.

[0134] The sequence listing is part of the description.

[0135] The following claims further set out particular embodiments of the disclosure.

### REFERENCES

[0136] Alenezi, F. N., Slama, H. B., Bouket, A. C., Cherif-Silini, H., Silini, A., Luptakova, L., Nowakowska, J. A., Oszako, T. & Belbahri, L. (2021) Bacillus velezensis: A Treasure House of Bioactive Compounds of Medicinal, Biocontrol and Environmental Importance. Forests, 12, 1714.
[0137] Alonge, M., Soyk, S., Ramakrishnan, S., Wang, X., Goodwin, S., Sedlazeck, F. J.& Schatz, M. C. (2019) RaGOO: fast and accurate reference-guided scaffolding of draft genomes. Genome Biology, 20(1), 1-17.
[0138] Altschul, S. F., Gish, W., Miller, W., Myers, E. W & Lipman, D. J. (1990) Basic local alignment search tool. J. Mol. Biol., 215(3), 403-410.
[0139] Armstrong, D. J., Azevedo, M. D., McPhail, K. L., Mills, D. I., Banowetz, G., Halgren, A. B, Jackson, M. D. & Thimmaiah, M. (2010) Control of Erwinia amylovora with vinylglycines and bacteria that produce vinylglycines. US 2010/0189798 A1.
[0140] Baym, M., Kryazhimskiy, S., Lieberman, T. D., Chung, H., Desai, M. M., & Kishony, R. (2015). Inexpensive multiplexed library preparation for megabase-sized genomes. PloS one, 10(5), e0128036.
[0141] Brower, W. (2011) Formulation and method for treating plants to control or suppress a plant pathogen. U.S. Pat. No. 7,906,131 B2.
[0142] Campanella, J. J., Bitincka, L. & Smalley, J. (2003) MatGAT: An application that generates similarity/identity matrices using protein or DNA sequences. BMC Bioinformatics 4, 29.
[0143] Cantalapiedra, C. P., Hernández-Plaza, A., Letunic, I., Bork, P., & Huerta-Cepas, J. (2021). eggNOG-mapper v2: functional annotation, orthology assignments, and domain prediction at the metagenomic scale. Molecular biology and evolution, 38(12), 5825-5829.
[0144] Chaumeil, P. A., Mussig, A. J., Hugenholtz, P., & Parks, D. H. (2022). GTDB-Tk v2: memory friendly classification with the genome taxonomy database. Bioinformatics, 38(23), 5315-5316.
[0145] Chen, X. H., Koumoutsi, A., Scholz, R., Eisenreich, A., Schneider, K., Heinemeyer, I., Morgenstern, B., Voss, B., Hess, W. R., Reva, O. et al. (2007) Comparative analysis of the complete genome sequence of the plant growth-promoting bacterium Bacillus amyloliquefaciens FZB42. Nat. Biotechnol., 25, 1007-1014.
[0146] Cheng, H.-P. & Walker, G. C. (1998) Succinoglycan is required for initiation and elongation of infection threads during nodulation of alfalfa by Rhizobium meliloti. Journal of Bacteriology, 180(19), 5183-5191. Dagher, F. & Deziel, E. (2022) Biological control agents against fire blight. U.S. Pat. No. 11,337,426 B2.
[0147] Donat, V., Biosca, E. G., Rico, A., Penalver, J., Borruel, M., Berra, D., Basterretxea, T., Murillo, J. & Lopez, M. M. (2005) Erwinia amylovora strains from outbreaks of fire blight in Spain: Phenotypic characteristics. Annals of Applied Biology, 146(1), 105-114.
[0148] Elert E. Rice by the numbers: A good grain. Nature, 2014, 514, S50-S51.
[0149] Fan, B., Wang, C., Song, X., Ding, X., Wu, L., Wu, H., Gao, X. & Borriss, R. (2018) Bacillus velezensis FZB42 in 2018: The Gram-Positive Model Strain for Plant Growth Promotion and Biocontrol. Frontiers in Microbiology, 9, 2491.
[0150] Gharsa, H. B., Bouri, M., Mougou, H. A., Schuster, C., Leclerque, A. & Rhouma, A. (2021) Bacillus velezensis strain MBY2, a potential agent for the management of crown gall disease. PLOS ONE 16(6): e0252823.
[0151] Gibson, D. G. et al., (2010) Creation of a Bacterial Cell Controlled by a Chemically Synthesized Genome. Science, 329, 52-56.
[0152] Gilbert, S., Xu, J., Acosta, K., Poulev, A., Lebeis, S. & Lam, E. (2018) Bacterial Production of Indole Related Compounds Reveals Their Role in Association Between Duckweeds and Endophytes. Frontiers in Chemistry, 6, 265.
[0153] Gupta, G. (2021) Recombinant peptide to treat fire blight. WO 2021/202476 A1.
[0154] Gurevich, A., Saveliev, V., Vyahhi, N., & Tesler, G. (2013). QUAST: quality assessment tool for genome assemblies. Bioinformatics, 29(8), 1072-1075.
[0155] Hansen, S. L., & Stewart, B. J. (1978) Slide Catalase: A Reliable Test for Differentiation and Presumptive Identification of Certain Clinically Significant Anaerobes. American Journal of Clinical Pathology, 69(1), 36-40.
[0156] Heins, S. D., Manker, D. C., Jiimenez, D. R., McCoy, R. J., Marrone, P. G. & Orjala, J. E. (2000) Strain of Bacillus for Controlling Plant Diseases and Corn Rootworm. U.S. Pat. No. 6,060,051B.
[0157] Jensen, S., Bergh, O., Enger, O. & Hjeltnes, B. (2002) Use of PCR-RFLP for genotyping 16S rRNA and characterizing bacteria cultured from halibut fry. Can. J. Microbiol., 48(5), 379-86.
[0158] Joly, P., Calteau, A., Wauquier, A., Dumas, R., Beuvin, M., Vallenet, D., Crovadore, J., Cochard, B., Lefort, F. & Berthon, J.-Y. (2021) From Strain Characterization to Field Authorization: Highlights on Bacillus velezensis Strain B25 Beneficial Properties for Plants and Its Activities on Phytopathogenic Fungi. Microorganisms, 9, 1924.
[0159] Kim, Y. S., Lee, Y., Cheon, W. et al. (2021) Characterization of Bacillus velezensis AK-0 as a biocontrol agent against apple bitter rot caused by Colletotrichum gloeosporioides. Sci. Rep. 11, 626.
[0160] Lee, M. D. (2019). GToTree: a user-friendly workflow for phylogenomics. Bioinformatics, 35(20), 4162-4164.
[0161] Mazzuchi, U., Luccesse, C. & Mazzuchi, A. (2014) Composition and method for preventing infections of vegetable tissues caused by Erwinia amylovora. WO 2014/177996 A1.
[0162] Mullen, B. & Mullen, L. L. (2011) Biological pest control mixture containing D-limonene and nutmeg oil. US 2011/0274677 A1.
[0163] Myo, E. M., Than, W. M., Win, T. & Khai, A. A. (2021) Evaluation of the symbiotic performance of tomato plants inoculated with Bacillus velezensis NKG-2 and challenged with Fusarium wilt pathogen. Archives of Phytopathology and Plant Protection, 54(17-18), 1391.
[0164] Needleman, S. B. & Wunsch, C. D. (1970) A general method applicable to the search for similarities in the amino acid sequence of two proteins. J. Mol. Biol., 48(3), 443-453.
[0165] Parks, D. H., Imelfort, M., Skennerton, C. T., Hugenholtz, P., & Tyson, G. W. (2015). CheckM: assessing the quality of microbial genomes recovered from isolates, single cells, and metagenomes. Genome research, 25(7), 1043-1055.
[0166] Paulin, J.-P. & Samson, R. (1973) Le feu bactérien en France. II.-caractères des souches d'Erwinia amylovora (Burril) Winslow et al. 1920, isolées du foyer franco-belge. Ann. Phytopathol. 5:389-397.
[0167] Pennisi E. Armed and dangerous. Science, 2010, 327, 804-805.
[0168] Penrose, D. M. & Glick, B. R. (2003) Methods for isolating and characterizing ACC deaminase-containing plant growth-promoting rhizobacteria. Physiologia Plantarum, 118(1), 10-15.
[0169] Perrin, A., & Rocha, E. P. (2021). PanACoTA: a modular tool for massive microbial comparative genomics. NAR genomics and bioinformatics, 3(1), Iqaa106.
[0170] Prjibelski, A., Antipov, D., Meleshko, D., Lapidus, A., & Korobeynikov, A. (2020). Using SPAdes de novo assembler. Current protocols in bioinformatics, 70(1), e102.
[0171] Pusey, P. L. (1999) Control of fire blight on pome fruit trees with Erwinia herbicola. U.S. Pat. No. 5,919,446 B2.
[0172] Reva, O. N., Swanevelder, D. Z. H., Mwita L. A., Mwakilili, A. D., Muzondiwa, D., Joubert, Monique., Chan, W. Y., Lutz, S., Ahrens C. H., Avdeeva, Lylia, V., Kharkhota M. A., Tibuhwa D., Lyantagaye, S., Vater, J., Borriss, R. & Meijer, J. (2019) Genetic, Epigenetic and Phenotypic Diversity of Four Bacillus velezensis Strains Used for Plant Protection or as Probiotics. Frontiers in Microbiology, 10, 2610.
[0173] Rooney, A. P., Price, N. P., Ehrhardt, C., Swezey, J. L. & Bannan, J. D. (2009) Phylogeny and molecular taxonomy of the Bacillus subtilis species complex and description of Bacillus subtilis subsp. Inaquosorum subsp. Nov. International Journal of Systematic and Evolutionary Microbiology, 59(10), 2429-2436.
[0174] Salvà-Serra, F., Gomila, M., Svensson-Stadler, L., Busquets, A., Jaén-Luchoro, D., Karlsson, R., & Moore, E. R. (2018). A protocol for extraction and purification of high-quality and quantity bacterial DNA applicable for genome sequencing: a modified version of the Marmur procedure.
[0175] Sebaihia, M, Bocsanczy, A. M., Biehl, B. S., Quail, M. A., Perna, N. T., Glasner, J. D., DeClerck, G. A., Cartinhour, S., Schneider, D. J., Bentley, S. D., Parkhill, J & Beer S. V. (2010) Complete genome sequence of the plant pathogen Erwinia amylovora strain ATCC 49946. J. Bacteriol., April; 192(7): 2020-1.
[0176] Seemann, T. (2014). Prokka: rapid prokaryotic genome annotation. Bioinformatics, 30(14), 2068-2069.
[0177] Shin, J.-H., Park, B.-S., Kim, H.-Y., Lee, K.-H. & Kim, K.-S. (2021) Antagonistic and Plant Growth-Promoting Effects of Bacillus velezensis BS1 Isolated from Rhizosphere Soil in a Pepper Field. The Plant Pathology Journal, 37(3), 307-314.
[0178] Skamnioti P and Gurr S J. Against the grain: safeguarding rice from rice blast disease. Trends Biotechnol., 2009, 27, 141-150.
[0179] Spinelli, F., Ciampolini, F., Cresti, M., Geider, K., & Costa, G. (2005) Influence of Stigmatic Morphology on Flower Colonization by Erwinia amylovora and Pantoea agglomerans. European Journal of Plant Pathology, 113(4), 395-405.
[0180] Taylor, R. K., Guilford, P. J., Clark, R. G., Hale, C. N. & Forster, R. L. S. (2001) Detection of Erwinia amylovora in plant material using novel polymerase chain reaction (PCR) primers. New Zealand Journal of Crop and Horticultural Science, 29(1), 35-43.
[0181] Umemura, K. & Hatakeyama, S. (2022) Agent for controlling scald disease and method for controlling scald disease. EP 4,018,831 A1.
[0182] Wang, S.-W., Herrera-Balandrano, D.D., Wang, Y.-X., Shi, X.-C., Chen, X., Jin, Y., Liu, F.-Q. & Laborda, P. (2022) Biocontrol Ability of the Bacillus amyloliquefaciens Group, B. amyloliquefaciens, B. velezensis, B. nakamurai, and B. siamensis, for the Management of Fungal Postharvest Diseases: A Review. Journal of Agricultural and Food Chemistry, 70(22), 6591.

The application's sequence listing, which the Patent Office published only in electronic form, follows.

SEQUENCE LISTING (72 sequences)

SEQ ID NO: 1 - protein, 198 aa, Bacillus velezensis
MKPMLPFEKYFGDLELVYAFYGAMPTGVTVSETGRIFICFPKWGDDVKFTVAEIIGDKLQPYPDLQTNLVNPENIKMTFISVQSVVTDGRGTLWVLDTAAPNFSKPIKGGAKLVAVDLKTNTIRRVYTFTEDVVLPTTYLNDVRFDFRVGTAGYAYITDSSSKGPGAIIVVDLETGNAFRRLNGEQIQLHRIPILYRK

SEQ ID NO: 2 - protein, 161 aa, Bacillus velezensis
MNRNRDGSTSPFRLASDGIAISPDGKVLFFCPLTSRHLFSISTEALRDRNIQDMDLLYHVAYWGEKGASDGMITDAKGAIYAGDYENNSIRKMLPNGTTETIAHDPRILWPDTFSIGPDGYLYVIVNQLHRQARFHYGKDLRQKPYSLLRIKIDEFPAPAF

SEQ ID NO: 3 - protein, 142 aa, Bacillus velezensis
MKLTEKQKRFADFYIELGNATEAARKAGYSQKTAKSIGQENLTKPDIKSYIKERLAEKDAERVASQDEILEFLTAVMRGEKTEQIPVGIGEGAQELEDKDPYLKDRVKAAELLGKRHGMWTEKVDMTGEFAVQFIDDSGDEE

SEQ ID NO: 4 - protein, 87 aa, Bacillus velezensis
MKKLFKSIILSAALLTGAVAVAPSASAAWSGWQNESGYSGRVFTDATTYTAGASTIDWKAEKKGDSGKRNYIGTFESAKFQRGIRWR

SEQ ID NO: 5 - protein, 84 aa, Bacillus velezensis
MAFRLFFHEENFGKTVSQLKKLVDEGKVKYFLLSGNNSGNTKLVSWIKKNGTKNSADPYSTEKNKLSPARNDRRPGRTKSADSV

SEQ ID NO: 6 - protein, 118 aa, Bacillus velezensis
MVNSLKLVQRAELWDEQNENIVEKLYVDHLPNDGLLREIIQDDTVFLVGKKTGESTIFTRAQEYSRISKSEISAYVDVKTMYGKSQVKELNEDSDYCKTLLCNCFIKSSNKRLIKRSE

SEQ ID NO: 7 - protein, 144 aa, Bacillus velezensis
MSLLPLNSALCLIEWRNLQAPHPYETSDTFLGGRQLLIFSAVFILLSLMFQVFAVKVLNLPKPVKKQKPINGTHRLIEITLLITGIAAVNFFNEMYVFAGVVFMLFCCTGIMEWRHRREEKQYVYDSFYAGLSAALGVLIFFIS

SEQ ID NO: 8 - protein, 86 aa, Bacillus velezensis
MHSENRKGKRVKAGRASVKTTRKGTYDLEYIFDRLCDAKRAENVFRKRLISTCVLVDICRIMLKRSECPQTYVILTLTLRAALYRG

SEQ ID NO: 9 - protein, 41 aa, Bacillus velezensis
MKTYKIASIPGDGVGKETVPQAERVLNAIAELHGGIAFDFK

SEQ ID NO: 10 - protein, 124 aa, Bacillus velezensis
MLKRFFLVFLTLIMSIFAVFAAAEESPGDRVISFDEPMIVLISLGIILCLFIPPFVMSFFGNLVVRIISGSLSKFYRPHVWGAHSDWISDSQWLFDNSCCRPGNFGQFSQCCGHLIRWQDREHK

SEQ ID NO: 11 - protein, 1862 aa, Bacillus velezensis
MAPGSPVAPVGPVTPVIPVTPVGPVAPVEPVTPVAPVSPVAPVGPVIPVGPVSPVAPVTPVGPVSPVAPVTPFAPVIPVAPVTPVAPMAPVAPVTPVEPVIPVGPVAPVGPVAPVEPVVPVTPARPVSPVAPVSPVAPVTPVGPVGPVGPVGPVIPVEPVTPVAPVGPVDPVIPVGPVTPVEPVSPVTPVGPVPPVAPVSPVGPVGPVAPVEPVGPVTPVIPVVPVVPVAPMAPVAPVSPVGPVSPVEPVAPVRPVSPVAPVTPVEPVEPVTPVAPVIPIDPVTPVTPVVPVGPVAPVEPVSPVEPVTPVEPVDPISPVGPVAPVGPVAPIEPVAPVGPVSPVGPISPVTPVAPVSPVEPVEPVAPVIPVDPVTPVPPVSPVTPVEPVGPVGPVEPVAPVTPVAPVIPVAPVTPVGPVTPVGPVAPVDPVEPVIPVAPVGPISPVTPVAPVSPIEPVEPVGPFSPVAPVTPVAPVSPVGPVSPVTPVTPVEPVVPVTPVIPVGPASPVAPVSPVEPVSPVAPVTPVAPVTPVEPVAPVSPVEPVTPVDPVGPVAPVIPVEPVDPVGPFSPVGPISPVTPVAPVGPVSPVGPISPVTPVAPVGPVSPVTPVTPVAPVTPVAPVTPVEPVVPVEPVSPVAPVGPVAPVTPVAPVTPVEPVVPVSPVGPVTPVSPVEPVVPIGPVSPVIPVAPIGPVSPVIPVAPVGPVSPVIPVAPVGPVSPVIPVAPVGPVVPVPPVTPVAPVGPVDPVAPVTPVEPVAPVDPVTPVAPVDPVTPVAPVSPVEPVTPVAPVSPVEPVIPVAPVAPVVPVEPVEPVSPVAPVAPVTPVAPVSPVEPVIPVAPLSPVEPVTPVEPVAPVVPVTPVGPVSPVGPVSPVIPVAPDAPVAPVSPVDPVSPVDPVAPVTPVEPVAPVTPVGPVTPVDPVSPVGPVSPVIPVGPAAPVGPVTPVEPVDPVTPVGPVDPVDPVAPVGPIAPVAPVDPVDPIAPVTPVGPVSPVAPVTPVAPVDPVTPVGPVVPVAPVIPVAPVAPDAPVDPVSPVDPVTPVGPVEPVDPVAPVGPAAPVVPVAPVEPVAPIEPVNPVGPVTPAGPVAPVEPVGPISPVEPVAPVTPVNPVGPVSPVAPVEPVTPVVPVTPVAPVSPVGPVIPVDPVAPDAPVTPVGPAAPVEPVSPVAPVTPVTPVDPMTPVGPVTPVDPVNPVSPVEPVTPVVPVTPVAPVSPVGPVAPVGPVTPVAPVSPVTPVTPVAPVIPVAPVSPVEPVAPVGPVTPVAPIGPVTPVGPVAPVEPVEPVAPVSPVDPVGPVSPVEPVDPVSPVDPVTPVDPVTPVGPVTPVSPVDPVDPVAPVTPVGPVSPVGPVTPVAPVSPVGPVIPVAPVGPMGPVAPVAPVIPVAPVTPVDPVSPVDPVAPVTPVEPVTPVTPVEPVAPVDPVAPVEPVAPVTPVEPVEPVAPVTPVGPVTPVAPVSPVGPVAPVAPVTPVEPVDPVKPVDPVKPVDPVKPVGPVAPVSPVGPVAPVEPVVPVPPVTPVTPVDPVDPVAPVSPVGPFSPVGPVEPVTPVAPVGPVGPVIPVAPVTPVAPISPVAPVTPVAPVDPVAPVEPVAPVGPIGPVTPVAPVIPVAPVTPVDPVTPVGPVSPVEPVAPVVPVIPVGPVTPVGPISPIGPVSPVEPVEPVDPVAPVGPVLPAEPVTPVDPVTPVGPVEPVGPVAPVEPVDPVTPVGPVTPVAPVMPVAPVAPVDPVAPIEPVNPVGPVTPSWPVTPVAPVTPVDPVTPVGPVTPVGPDAPVDPVTPVAPVVPVEPVVPVAPVEPVPPVTPLGPVTPVGPVTPVGPVIPVTPGSPPVCANETSSIKIVPVETLLNTMTAEAAPEGTLLVL

SEQ ID NO: 12 - protein, 207 aa, Bacillus velezensis
MLNDYIKPSILWTDVEDRIDATFYRTDFVVSLDKIFKNLTIPVLPNRQLIHELTDYTANGSFESLKKNVRYTNEAGIPMIRGKNLKNGVLDKTDLNYVTDDTYRFLKKSELNAGDLLFTKTGTLGNTIVWSEYFGKATLGDNIFKVRYKNGINPYYIHAYFSTDYGYKWVERFAQGGVQPTIILALVKSEISAEPLVIPLPNTSDPL

SEQ ID NO: 13 - protein, 626 aa, Bacillus velezensis
MQALIEELKEQLMMKGYSTFSGPETHEEDGTTIFLASGDEKIVYVKVFDKGADLSFEVQDAALIEAQYHEEAPDFIWASNGEVNYYADCIESDPLAEIPAVIDVTKKEKRQISKQEEWSRKMYSTLQKRFDDLHERLYGPGGADNISSTNEAIDELSKLLFMETFRLYHPDYVLREGENAGLRILDILKYQYIKENGKEAVRQIRDAFKEIKNHEDYVAVNDLGEECFIFSEDEYIRLENPANFIAAFETFQELDDFEDENGNRVKATLKNVSADILGRLFDVLMRGKYDNKIGQATYLTPRQVTEAMIEMVVHDLTSNPKEASKLITADEKGIPTFRMGDITCGSGGFLIKGYEAVKKYMLTQFTGTMKEKMEKHFELMKEHSFVGADKTRNMVLKARLNMAMHGLPKAPIFWVNDSLMTESLKPKSFDLIVTNPPFKSGSVSSKTDEGKAILERYSEGIDETGKPKKEGLCLGAKPNPKGIWKEVSSTDQAVLFIDRNLQLLKDGGQLIIVLPDGILSNSGYKHVREYLMGKKNEVTGEFEGGKGIVKAVVSLPTVTFQLSGTGAKTSFLYIKKKEHENEKQGPVFMAVAEEIGFDVKNKIEVQLGNDRNDLLKIVDVYKKGVN

SEQ ID NO: 14 - protein, 121 aa, Bacillus velezensis
MRLILHEYLTIPKTTEQLVNIAKEHGLNWNEEQVKLYCLLDPSIYETESGQWAVKVDDRRHTILGAIEKALEKRPMTKIDPNIIEQLPSDMIVPHNEVIEVAVSTGRYESPRENIIRVKRK

SEQ ID NO: 15 - protein, 39 aa, Bacillus velezensis
MKEVLVLQQFDEKSEVEPTAWTVTLTTISVTLSTLSNHC

SEQ ID NO: 16 - protein, 865 aa, Bacillus velezensis
MDKKLVYFQHMSEDSKYYIEKSPNAETDPYEVHNIPNHYTVSTEYKSPWKFYNNPNHNLKEQGWKIHVSATMNNAQDILKVVSQIMFKHQIPFKHIKDKQSLFNMNSKHGNRTSSGKFIAIYPSSNNMFFDLLNELYEELKHYENGPYILNDKSWKDSNIYYRYGAFKNIYNERGELCIKDENGNLIPDNRNPYYKIPDFVSDFDQFLDTKNNLLDTQDVSNFNDYEFQGVLRFNNGGGIYTGIRKSDGKKVVIKEGRPKVGLDGQYNDAIDRLNIEYEALNKLTEVEGVVKALDYFKAWKHVFLVEEFVEGVTLQSWCAINYPFNVETDKNEYISKVKKIINSLIKAIKLMHSKNVGMGDLQPQNIMITPELNVKIIDFEAASALSEENGALQTIGYTHKKNKNHKERDWYALKKVLRFCILPIGPVVDIEETIKKKHDMWIEEEFGKDVYQYVVNTENLCDKYLSDTKEKRFNNNYDSKIQKEMDMSKIIKGLRKNIESNILPNSSLIHGDVRQFVMPSGKLNVLTGGTGAALALYRSGNINKRVQDWIEIVLLENLNVLNDDIGLFTGKAGIAVTLYELGYTEQAVDIFNNLSYEDMKDISLRSGLSGIGLSLISLYLEENNDDLLVTSEKIADQIENRIIEDDELSVTDFAAVPIGLIDGWSGISLFYAALYSVTNNEKYYLKSKEYIERDLKHCKVDEETNTLQTYDDQNPRLLPYLSGGSIGIGIAIWYLNYVRDTNLFREELEQIINLNKVRIAYSGGLFDGIGSFLLIPPMTKEKNEISQHIELAMKKLELFLIRKDDQILFPGNFSFRLADDYYSGSAGIILGINSIQFSNPLYWLPIIKIDSFLRKTKKELLLNN

SEQ ID NO: 17 - protein, 590 aa, Bacillus velezensis
MMTSPKFKSIEFFFLLRKTRPNIRLFILAIFLSGLSAIASTLVPHYLKSLIDNYNILDKINLRDLLGLLGIFLSSGIIGAVGSYMLSVVGYNVVANLRNLLWEKIVILPVEFYDKNRSADIASRFVNDTTVIYNLVSNSFSQFINAILIVLFCGFWLFYYDWQLTLVIIVAIPIYLLIFIPLGRILSKLSKMTQSLTGKLNVRAVETISSIRLIKSSTAEKLQVEKGRDDIEALRNIGLRQTKWMVILNPIINLMMMLIIISIIGFGGVKLANGSLSPGTFIAFLTLMFYIIGPLNNLGLFFTQIQKTIGATERISQLIYEQGEDQHKGKELAETYKDLVIENLSFCYGKEDKAFSLNNINLVIKRGSVNALVGPSGSGKTTIISILERYYKPNSGSIYFGEENIELYSLKSWRSQIGYVAQNHDLISGTVRDNLIFGLENTPNENRIVEACKKAYAWQFISELPNSLETNIGEKGLNLSGGQRQRIAIARMFLKNPNIIFLDEATASLDSHSEQIVNEAMKKLMKDRTAIIIAHRLSTIINADNIIFMENGEVTGQGNHWELKRSHKLYHQFCEQQFKEDSTDPLVLTN

SEQ ID NO: 18 - protein, 463 aa, Bacillus velezensis
MKNLRRISMVFILLFVSSLQPISSHAEESNYDESIIINLDSKVSESTINKVKDRYSNIGTNYIKELDLLVIDNIKPSQFSAIKDIAKEKLDAKEIIEDKEISLPSKQLSSKLAISSQFTEDNDTLYDSWLWNIKQVTNDYRSYRINKGSHNTKVGVIDSGIDFNHPDLKNNIVDTGESFVPVEDNTQDFYGHGTSVAGIIAANGDVKGVGPNLGLVPYKVFDKNGKSKTSWVISAIVKATEDDMDVINLSLSTFLSKKDKEDRETIKLFEKAFKFARKHNTLIVAAAGNHGYDISNSKKLAQQLGKPKDNILLLPGGDNDVITVSATTAQNTKASYSNYGKTISIAAPGGDLDPSFLDTNKVDLYSLVWTTSPVNIPQTPLSKSLGFQKGYEPTLGTSVAAPIVTATAALLKTEYYEKYGVEMSNRKVEKNLYQNTDHFENLNKNEVGSGIVNAYESLLNIER

SEQ ID NO: 19 - protein, 47 aa, Bacillus velezensis
MNNVLALQQLNKSAEVEPQVGPTITTITVIPTMVISLISNYCDNHAS

SEQ ID NO: 20 - protein, 43 aa, Bacillus velezensis
MRDVLELQQLNEGTEVEASKGKGGLLTLITTVVGTSTISNNCG

SEQ ID NO: 21 - DNA, 21 bp, synthetic construct
  source 1..21: mol_type = other DNA
agagtttgatcactggctcag

SEQ ID NO: 22 - DNA, 22 bp, synthetic construct
  source 1..22: mol_type = other DNA
tacggytaccttgttacgactt

SEQ ID NO: 23 - DNA, 20 bp, synthetic construct
  source 1..20: mol_type = other DNA
gacgtgggatggctacaact

SEQ ID NO: 24 - DNA, 20 bp, synthetic construct
  source 1..20: mol_type = other DNA
attgtcgcctttaacgatgg

SEQ ID NO: 25 - DNA, 24 bp, synthetic construct
  source 1..24: mol_type = other DNA
cagtcaggaaatgcgtacgtcctt

SEQ ID NO: 26 - DNA, 24 bp, synthetic construct
  source 1..24: mol_type = other DNA
caaggtaatgctccaggcattgct

SEQ ID NO: 27 - DNA, 1170 bp, Bacillus velezensis
  source 1..1170: mol_type = genomic DNA
ccattctgtcaccattcggcggctggctcataaaggttacctcaccgacttcgggtgttacaaactctcgtggtgtgacgggcggtgtgtacaaggcccgggaacgtattcaccgcggcatgctgatccgcgattactagcgattccagcttcacgcagtcgagttgcagactgcgatccgaactgagaacagatttgtgggattggcttaacctcgcggtttcgctgccctttgttctgtccattgtagcacgtgtgtagcccaggtcataaggggcatgatgatttgacgtcatccccaccttcctccggtttgtcaccggcagtcaccttagagtgcccaactgaatgctggcaactaagatcaagggttgcgctcgttgcgggacttaacccaacatctcacgacacgagctgacgacaaccatgcaccacctgtcactctgcccccgaaggggacgtcctatctctaggattgtcagaggatgtcaagacctggtaaggttcttcgcgttgcttcgaattaaaccacatgctccaccgcttgtgcgggcccccgtcaattcctttgagtttcagtcttgcgaccgtactccccaggcggagtgcttaatgcgttagctgcagcactaaggggcggaaaccccctaacacttagcactcatcgtttacggcgtggactaccagggtatctaatcctgttcgctccccacgctttcgctcctcagcgtcagttacagaccagagagtcgccttcgccactggtgttcctccacatctctacgcatttcaccgctacacgtggaattccactctcctcttctgcactcaagttccccagtttccaatgaccctccccggttgagccgggggctttcacatcagacttaagaaaccgcctgcgagccctttacgcccaataattccggacaacgcttgccacctacgtattaccgcggctgctggcacgtagttagccgtggctttctggttaggtaccgtcaaggtgccgccctatttgaacggcacttgttcttccctaacaacagagctttacgatccgaaaaccttcatcactcacgcggcgttgctccgtcagactttcgtccattgcgganaattccctactgctgcctcccgtaggagtctgggccgggtctcagtcccatg

SEQ ID NO: 28 - DNA, 1026 bp, Bacillus velezensis
  source 1..1026: mol_type = genomic DNA
tgacgccttgtgaagatgatgtatacacatctattcacattgaagaatatgaatcagaagcacgtgatacaaagcttgggcctgaagagatcacccgcgatattccaaacgtaggggaagacgcgcttcgcaatcttgatgaccgcggaattatccgtatcggtgcggaagtcaacgacggagaccttctcgtaggtaaagtaacgcctaaaggtgtaactgagcttacggctgaagaacgccttctgcatgcgatctttggagaaaaagcgcgtgaagtccgtgatacttctctccgtgtgcctcacggcggcggcggaattatccacgacgtaaaagtcttcaaccgtgaagacggcgacgaacttcctccgggagtgaaccagcttgtacgcgtatatatcgttcagaaacgtaagatttctgaaggtgataaaatggccggacgtcacggaaacaaaggggttatctcgaagattcttcctgaagaagatatgccttaccttcctgacggcacgccgatcgatatcatgcttaacccgctgggtgtaccatcacgtatgaatatcggtcaggtattagaacttcacatgggtatggctgcccgctacctcggcattcacatcgcgtcacctgtatttgacggcgcgcgtgaagaagatgtgtgggaaacacttgaagaagcaggcatgtcaagagacgctaaaacagttctttatgacggccgtacgggagaaccgtttgacaaccgtgtatctgtcggaatcatgtacatgatcaaactggcgcacatggttgatgataaacttcatgcccgttctacaggtccttactcacttgttacgcagcagcctctcggcggtaaagcccaattcggcggacagcgtttcggtgagatggaggtttgggcgctcgaagcttacggcgcagcttacacgcttcaagaaatcctgactgtgaagtccgatgacgtggtcggacgtgtgaaaacatatgaagcctcgtataagggggaaacaataaagg

SEQ ID NO: 29 - DNA, 976 bp, Bacillus velezensis
  source 1..976: mol_type = genomic DNA
atcccgggcgcttccggatgtgcgtgacggtgtgaggccggttcccttgagattttgtacgcaatgaatgatttaggcatgaccagtgacaaaccatataaaaaatctgcccgtatcgtcggtgaagttatcggtaagtaccacccgcacggtgactcagcggtttacgaatcaatggtcagaatggcgcaggattttaactaccgctacatgcttgttgacggacacggcaacttcggttcggttgacggcgactcagcggccgcgatgcgttacacagaagcgagaatgtcaaaaatcgcaatggaaatcctccgggacattacgaaagatacgattgattatcaagataactatgacggcgcagaaagagaacctgtcgtcatgccttcgagatttccgaatctgctcgtaaacggagctgccggtattgcggtcggaatggcgacaaatattcctccgcatcagcttggggaagtcattgaaggcgtgcttgccgtaagtgagaatcctgagattacaaaccaggagctgatggaatacatcccgggcccggattttccgactgcaggtcagattttgggccggagcggcatccgcaaggcatatgaatccggacggggatccattacgatccgggctaaggctgaaatcgaagagacatcatcgggaaaagaaagaattattgtcacagaacttccttatcaggtgaacaaagcgagattaattgaaaaaatcgcagatcttgtccgggacaaaaaaatcgaaggaattaccgatctgcgtgacgaatccgaccgtaacggaatgagaatcgtcattgagatccgccgtgacgccaatgctcacgtcattttgaataacctgtacaaacaaacggccctgcagacgtctttcggaatcaacctgctggcgctcgttgacggacagccgaaggtactaagcctgaagcaatgcctggagccattaccttgaa

SEQ ID NO: 30 - DNA, 1126534 bp, Bacillus velezensis
  source 1..1126534: mol_type = genomic DNA
ccttcaccgcatcgcccgggatcacggctccactttgtatatggtgcttctcgccgcgtacaatacgttactcgcgaaattgagcgggcaggaagacatcatcgtcggctcaccgattgccgggcgtccgcacaaagaccttgaaccgattctcggcatgttcgtcaacacgctggccatcagaacggagccgaaaggagacaaacggttcaccgattacttggcggaagtacgccgggcggcgcttgaggcatatgagcatcaagactatccgtttgaagagctggtggaacggctcggcgtacagcgggacacaagccgcaatccgctgtttgacgccatgcttgtcgtccagaatatagagcatgaggaactgctgttggacggtttgcatattcagcctgcggatgtgtcccgtccggtttccaaatttgatgtcactttacaggcttctgaaggcgggggacagattcattttctgtttgaatatgcggcgtctttattccggagagaaacaatgcagcgctgggcttcccactttatgacgatgcttgaacacattgtccgtgaaccggaaacttctttacaagcgatcagcatgctgactgctccggaacggaaccggattctttcggactttaacggcttgacggatcaacagctgcctgaaaaaacagttcatgaactgttcatcacccaggcgcgaaaaacacctgatgccgcggcccttatcagcggggaaacattgatcacatacaaagaattagatgactggtcgaataaaatcgccagagctctgcaaaaacggcagatcggacctgatgcagccgtcggcattgtgataccaagatcgccggaacaagtagcggcagtcttcggggtttggaaagccggaggagcctacgtcccgatagatcctgaatatccggaggaacgcaagcaatatatcatctcagacagcggcacagcgcttctccttaccgcacacggtgcgatagaacaagtgcctgatcgttttaacggtgaagtgctcgcactggaggatatccaagaacaggatgcttcgccggtccagtcattatcagcaccggaagatttggcttacatcatttatacatcgggaacgacaggcaggccgaaaggggttttggtcgaacatcgatccgtcagccaaactcttcaatggcggagcggattttatgatctgaatgagaaagatacgattcttcagctcttttcattttcatttgacggttttgtaacaagcatgttcacaccgctgatttccggtgcgaaagcggccgttttagccgaagatgaagcaagagatattcttgctattaaacactatcttgcatcttaccgcatcactcacatgatcattgttcccgtactgtaccgtacactgcttgacgtactggagccgggggatgccgagtctctcagaattgtcacattagccggagaagctgtcgaccaaaacattatcagccgcagtttatcagtttgtcctcacactgagcttgccaatgagtacggcccgacggaaaacagcgtcgccactacagcggcaagacatatagaacaaagtgagaacatcacgatcggccgtccgattgagcattcacacgtttatattttaaacggggatcacccgcagccgatcggtgtaacaggagaactttgcatctcgggttccggccttgcaagagggtaccgcaatcttcctaagcaaacggcccaagcctttgtccaagacccgttccggaagaaccggcgcatgtaccgcacgggcgacctggcaaaatggctgccggacggcacgctgcaatatatcggccgaatggacgagcaagtcaaaatcagaggctaccgggtggaactgaaagaaattgaatccgccttaacaggcataaaaggtgtcaaagaagcagccgtcaccgctcataccgcatcagcaggccaaacggaactatgcgcttatatcgtgacagaagaaggaacagaaagtgaaaccgtgcagcaggcactaagaaatgaaatgcccgcttatatggtgccggcgttctttgaaacacttgaagccctgcctgtcacaccgaacgggaagcttgaccgccgcgcgcttcctgagccgcggaaaaaagcgcacaccggacgggcatttaccgagcctgaaagtgacatggaaaaagagctgtccgcgatttggagcgaagtgctcggaactgaaaacattgccgcggatcaatcattttttgaactgggcggcgattccatcaaagccctgcaagtatcagcccgattacatcaggctggaaaacagatcgccgtaaaagatattttcagccggccgacaattagggagctggcgccttatgtccgtacagagcggcagccggtcagccaagctcctgcagaaggagaagtgaagtggtcgccggttcacaaatggttcttcacacaagacatgaaggaagcaaaccattttaaccagtccgtcatgctgacgagaacaaattcaatagatgaagagatcctgaggaaaacgttaaaagccattaccgttcatcatgatgccttgcgccttgtctgcaaaaaagacgaagagaaaggtcttctccttttcaacagaccggctgacctcgcagatgagcagctttacagcctgaccattttagaaacggaaggcgatgagcatgagaaggaacgttttgtaaaacgccgcgtcgccgagcttcagagaaacatggatttggagaacgggccgcttgtacaggcggggctgttccgctctgaagcagaagattacttgtttctgacggtccatcatctcgctgtcgacgggatatcatggcggattttattggaagacttggcttctgcttatgagcaggccgtctctggacaggaaatcaaactccctccgaaaaccatgtcattcaaaacatatacggagcagctggccgattatgccgaaagcagacagctgcttcagcaggcggagtattggcgggagattgaacactatgaaacagaaagtcttccttacgagcaggcagatctatctcaaactcctgcaaaaaaacggaacacggtatccttcactctgacagaaagtgaaacggacgccctgttgaaagatgtgcacagcgcctacaatacggatacgcaagatgtgcttttggcttccgccgtgcttgccgttcagaagtggtcgccgcggcacgctttgaaaatcgcccttgaaggacacggacgccaatcggagcaggcaggtgcggacatcagcaggacggtgggatggttcacttccatttacccggtgcttttccggagcggagcttatgaacctcttgaagaatatgaaattcgcacattgaaaaccgtcaaagacacattgcggcgcattccggataaagggaacggatacggcgtcctcaaatatttaacaccgccgaagcttgccgggatgactttcgggaaagcaccggagatcggctttaactatctcggacaattcgatgcgcccggcgggaatccggcagaaacggaacagccagacgcgtttcagttttctcctttgggaggcggagatgatgtgacagatacatggaaacgggagcagtcacttgaaatcagcgcgattgcggcaaaaggccggatgaccgtcagcatttcctatgaaacggagcgcttccggcaagatacgatcgaacggctgtccgaaagctgccggtattatctcctgaaactgtcggaacactgcctcagcaaaaccgatacggagaagaccgtcagtgactttgatgatcgggagctgactgaggaagccttgcaggatattgccgacttactcagcttccactaaaccgagcgggaggaacacatggacaaaacaaaaaatatccaaaatatttatcccctcagccgaatgcaggaaggaatgctttttcattcctttctgcaaaaggagggggctgcatatatcgagcaatccgtcttcaccataaaaggccggcttcgtccggaactgtttgagcaaagcgtacagtctgttatcagccgccacgatattttcagaacggtttttttacctcatgtcgctcagctgaacggcccccgccaagttgtgctgcgtgagcgggaattccggctgcaccgcgaagatcttacacatttggacgaagcggaacagagcatctatttacagcgatttaaggaacgtgaccgcttaaaaggctttgacttgcaaaaggatatgctgatgcgtgtttctttgtttaaaacggctgacgaaaaatatgtatgcgtctggagccaccatcacatccttatggacggctggtgcctcggcatcgtccttcaggaattcatgcatatgtaccgggcgattgaatcaggctcacccgtcacactggcgcccgcaaagccttacagcacttatattacatggctgactgatcaggacaaagacgcggcttctgaatattggaaaggatatttagcaggctgtgagacacccacaggactcccgaaaatatcggcccgtcctcaggaaaaaggctaccgcaaggaagagctgctgttttctttagatcaaaacctgacggacaagctaaaaaccatcgccaaagaagagggcgctacgctcgcggttcttatgcagactgtatggggcctgatgttgcagcgctacaaccggacggacgatgccgtattcggtgccgtcgtatcaggacgcccttccgtcattgacggcgtggaaagcatgatcggtctgtttatcaataccgtgccggtacgcattaaaacgggtgacgaaagctttagagaactgctggggcgcttgcagaaagaaatgcttgactcagaggcgttcagttttcatccgcttgctgacatccaatctcagactgagctgaaacaggatttaatcgaccatatcatcgtgtttgaaaattatccgattcagcagcagatgaaagacgcggaaaaggaatcggatgcaccgttccggatcgggaatgtcaacgtgtcggaacaatcgggctacgattttaacctcatcatagcgcctggcgatgagctgctcatcaaattcagctacaatgcgaacgtttatgacgaagtatggatagagagcgtaaaaggacacttggaagaagctctgcgcggcgccgccttcaatcccgatgttcccgctgatcggcttccgatgctcggacaaaaggaaaaatcaagaataatcggcgaatttaatgacacgaaaacaacttatgaaagagacgaaagcatcatcagcctgttcagccgacaggtgaagaaaaccccggaccatcaggcgcttcacgccggcgggctgacgatgacgtaccgggagctcgatgaacggtcaactgcattcgcccgcaccctgctggaaaacggtttggcgccaaagggaattgccgggattctggccgaacgctcaccggaatttatcatcgctgttctcgctgtattgaaagcgggagggacgtaccttcctcttgatgcagaactgccatccgacaggattgccgatatgctcactgagagcggagcacagctgttaacggtacaaaaagggattgagactgatattgacttttctcacatcatctctatcccggctgcagctgaaaaacaaacagctgatgcgggaaaactgaataccgatacagcacctgatgaccttgcctatattatgtatacatccggttcaacaggaaaaccgaagggcgtgatgatttccaaccgaaacgtcgtatcgctcgtgtcaaacagcaattacacgtcggctggcatgtcggaccgcctcattctgacagggtccatcggttttgatgcagtgacatttgaaatcttcggagcgcttttgaacggagcatgtcttcatgtggttgaccgctcgacaatgcttgccactgagaggttcggcaattatctttcttccaaccggattacgattctgtttttgacgacggcgctctttaaccagtttgcccaggcagatccggagatgttttccggcttgcacaccttatatgtcggcggagaagcattgtccccggcgctcatcaataaggtcagacaccgctgtccgaatctcagcctttataacatatacggaccgacggaaaatacgacattttccaccttttacgaaatcaggcatgacttttctcagccgatcccaatcggaaaaccgatcagcaattcaaccgcgtatatcattgataaaaacggcggacttgcgccgatcggcgtgcccggtgagctttgtgtcggcggtgacggggttgccaaaggctatttaaacaggcctgacttaacaagtgaagcatttgtcagccatccggttcatcctgaagaaaagatctacaaaacaggcgacttggcacactggctgcctgatggaagcatcggatacatcagccgtatcgaccgccaattcaagattcgcgggaagcggattgagccggccgaaattgaagcacgcttgactgaaatcgaaggaatcagggaatcggcagtcatcgcagcaaaagaaggacaagaagcaatcctttgtgcgtattatacaggcgcacatgctgaagaaagagccattcgatccctgttggccaggtcgcttcccgactatatgattccgcagtatgtgattaagcttgaccgtatgccgcttaccgcaaacggcaaagtggaccgccgcgggctgcctgcgccggaacggaaaaaaacgtcatcaaaagccgttccgccacgaaactgggtagagcgtgagctgatcgacatttggacgccgatcctcggctgcggggagctgggcatacaggatgacttctttgagctgggcggccattctttgaaagcattgcaagtgattcatcagctgaagaccaggcagcagatggatgtgccgattgaaatgatatttgaatatccgacaattgaacaattggccgaaaagctgtattcaaacacgctgtcagaagttgccgaacagcatatcagcagactgaaccagccgaaaggccgcaatcttttctgttttccgcctatctcaggtttcggcattttctttaaagatcttgcggcggcattaaacggacgggctgctgtgtacggctttaactttattgaagaagacagcagaatggaacaatacattgataaaatgctggaaatccagccggaaggcccttatatcctcttcggatattcagcgggcggcaatacggcattcgaggcggcaaaagcgatggaaaagcgcggcttagaaatcagcgacgtcattatcgcagacgcgtacagaaagcttgacgcactgccgccgcagccaacaaacgcaacagccgaaaatgtcccggaagccgtcagggaagcggtcatcagaaaaacagagtgctatcaaacgtactgggcggaactgataaatgacggccaaatcgcggcaaacctccattttatcgaagccggcataaaggaagagcagagtgataagaccgagccgatgaagtgggaaggcgccacaacgggactctatcaggaatatcaaggcgggggcgcccataaagatatgtttgaacccgcctttgcacagcaaaatgctgaggtcatactggacatcattgcaaacagcggaagacgcttggcgcggaatctgtaacatccggcagaatggctgaagaagacaaagggcaagataggggaatcaaactcagtttttttggaggctttgacatgacgaacctatcttggcttacgtatgtaatgatcattcttgccagctaccggctgacccatttgatcgtatttgataagattacggaattcataagaaaaccctttataaagcaagaaaaaaccgtcgatcaaaacgggcgcgccgtccaaaaaaaagtcccttcctccgcattcggttatatgctgcaatgttattggtgtgcgggcgtctggtgcgccatattgatcggtatctgctacttggtctggccccgctatgcacatccggttattttcattttatccatcgccggagcgcaggccattcttgaaacatgtgtcggcgtcggaacaaaagtcattgacgtgctcgccgccataaaacataaaaagtcctgaagcgttttattcgctttaggacttttttctttcccttttaggctgagaggagcaaagcaggctttctgattcaccgcccggaatgcttcggaataccgtaaagcagagagggggaaaaacatgaaaagctgccgttttagcatgatatggtttttgaccgttgtactgacagccggtatctttacattctcagcatccgcacaagcaagcggcactcagccggagagagaaatgagagccgtatggatcgcgtctgtcaccaatatcgactggccctctaaaaaagggctgtcaccggaagagcaaaaaagagaatacagcaagctgctggatgacgttcaggagatgggaatgaacgccgttatcgtccaaattaagcctgcggctgatgctttttatccatcagattacgggccttggtcagagtatctgacaggaacacaaggcaaaaatccaggctacgatccgcttgcttttttagttgaagagacacataaacggaatcttgaatttcacgcttggttcaatccttaccggatcacgatgaatcacacaaatttgaatgcgctttcagatgatcatcccgcgcgttcccatccggactgggtcgctgcatacggaaaacagctttactataatccgggcattccagaagtaagacaatttataacggatggaatcaaagaagtggtcagccgttatgacattgatgcagttcatatggatgattatttttatccttataaaattgccggacaggagttccccgatcaggcggaatacgaacggtacggaaaagctcactttgcatcagttgatgactggcgcagggataacgtcaaccggcttgtaaaagaaatcaaccaaaccatcaagcgagaaaaaccttatgtcaaattcggaatcagcccgttcggcgtatggagaaatgccgcagatgacccgacaggctccgaaacggccgcaggggtgcggaactatgatgatttatatgctgatacgagagaatggatccaaaaaggatacattgattacatcgcaccgcaaatttactggagcatcggatttaaagcggcggcatatgacgtcttagcggattggtggggaaaagaagtgaacaatcggccggtgcatttatatatcgggcaggcagcttataaaatcaacaacaatgctgatccggcctgggccgacccgggggaatacggaagacagattactctaaacaggggatcagcttggattaaaggcagcatgcatttcagtttaaaggatttaaaccgtaatccgctcgatgtgaaaaaccgattgatcaaagacatgtacagccggcccgcattaattcccgagatgccttggctcggacattccgctttaaaaaaaccgtctgtcaaacgggcggagaagaatgcttcaggccataaactctatattgaagatgcgaaatccaacggtaaaaaaacggcttattacgccatttaccgcgcagaaaagggaaagcagccttatttagtggatacagtcagaaaaacatcgtcacggacgcagacattttcagatactgatactcgggcgaaaggagcctgcacctatatcgttacttccgttgacaggcttcaccatgagagccgtccctccgcaaaacggacggttaaatagcattattaataaaactgacagttgcggcgctgtcagtttttttggcggcggatgagtccgaatgttcagacttcatttggatggaatgaataaagacccccattaataaaatgtagaaagcagcagaaggaggaaggttaatgaattttcaactgacaaaagaacagcagatggtgcgcgaaatggtcagagatttcgccaaaaatgaaattgccccgaaagcccatgaggttgatcaatcagccgtcttcccgatagacacatttaaaaaaataggcgaactcgggctgctcggaattccgtttccggaagaatacggcggggcgggcggtgacaccatttcatatgcggcagcggtcgaagaaatcggaaaagcctgcggcagcactgggctgagctacgcggcagccgtgtcactcggcgcaagcccattatactatttcggtactgaacagcaaaagcaagaacatcttattccgcttgcttcgggaaaagcgctcggatcattcgggctgacggagccgaatgcaggttccgatgccggcggtacccagacaaaagccgagaaaaagggcgatgactatgtgataaacggagagaaatgctggatcacaaacgcaaattacgcccgaacggtcattgtcaccgccgttacgggaaagaactcctccggaaaaccgatcatttcagctctgatcgtcccgacagacacaccgggatttacgatcacaaatccgtacgacaagatgggtgtgagagggtcggatacggccgagcttgtgctggaggatgtcagggtgcctgccgataacctgctcggtgatcctgaaaaaggttttaaacaatttttatatacattagacggcgggcggatctcgattgcggcactggctgtcggtatcgctcaaggcgcactggaggcgtcgctgtcatatgcgaaggaacgcaagcagttcggcagtccgatatcgtcatttcaagccattcaatttaagctggccgatatggcgatggaaattgaccttgccagacagatggtgcttaaagcggcatggctgaaggatcaaaacctgccatttacgaaagaagcggcattcgccaagctttatgcttctgaaatggccgtcagaacatgccttcaggccatccaaattcatggcggttccggttatatgaaggaatgcggtgtcgaacgtatgcttcgtgacgcaaagctgatggagattggcgaaggaacgtcagaaattcaaagaatggtcatcgcaagacagcttttgaagtgaaatgaaaacgtttactaatacagggatggaaaggggcaggtcatatggctgaacttatccatttaacagccggaaagctgcttgagcggaccgcggagctttttccggatcgtgaagcggttgtttaccctgagcgcggccttcgttatacgtatgccgagtttgacccgttatgccggcaaaccgcaaaagggctgatgaagctgggagttgaaaaaggagatcatgtagccatatgggcatccaacattccggaatggctcgcggcgcaatttgcaacggcgaaaatcggcgccgttctggtcaccattaataccaattttcaaatcgcagagctcgattatctgctggcacattcagacgtctcggccctgataatcatggattcctaccgacagacatcttatgttgaaatcgtgaataagctgattccggagctgaaaacgtgtgagcgcggcaggctgcgttcgaaacgttatccctttttacggacggtgttatatatcggtgataaaagcccgcccgggatgcaccgttgggattctttgctgaaggatgctgagtctgtaacggatgcagagcttgacggaaggatggacagcctgaaaaaggatgattgcattcatatgcaatatacatcaggtacgaccggatttccgaaaggcgtcatgctctcacattttaatatcgtaaataacgcggcaaatatcgcagaatgcatgaagcttacttcaagtgaccgtttatgtattcccgtgccgtttttccactgctttgggtgtgtgctcggcgtgctggcatgtgtttccgcgggtgcggcgatgattccgatcgaacagttttctccgccggccgttctgaaaacggtggagcaagaagcctgcacggctctgcacagtgtaccgacgatgtttatcgccctccttcatgacaaccgtttttctgaatatgatctttcccacgtccgaaccggtattatggcaggctcgccatgcccggcggaagtcatgagagaagtgatcggcaaaatggggatgactgacattacaattgcctacggacagaccgaagcatcacctgtcattacgcagacaagaacggatgattcatttaaaagaagagtcgaaacagcggggcgcgcgcttccccatatcgaagtcagaatcgttcggcccggaacatcccaagaagccgcccggggcgaacaaggagagctctgcacccgcggatatcatgtcatgaaaggctattataaaaatcaagaagcgaccgaagaagcgatagacaaagacggctggctgcataccggtgatttggcggtcatggacgaggacgggtattgcaaaatcacgggccgtctgaaagacatgctgatcaggggcggcgaaaatatctatccgcgtgagattgaggaaatgttatatcggcatcccgcggtagcagacgttcaggtcgtcggcgtgcctgatccgaaatacggagaagaggccgcggcatgggtcaggctcaaagacggacaaaccgcttccgcagaagacatcagaaccttttgcaaagaacatatcgcccgctataaagtccccaggtatgttttgtttacagatgaatatccaatgacagcctcaggaaaaattcagaaattcaagctgcgggaaaaaacgattgaagagctcaagttaacttaatgaaaaaggagtgcttcacatttgtttaaaaaagtcctgattgccaacagaggagaaatcgccttaagaattatccgcacctgcaaacgtctcggcatcccctcggcagctgtctattcagaagccgaccgggacgcgctgcacgtaaaagcggctgatgaggcctatccgatcggaaaatcgagagtaaatgaaagctatttacatatcgacagaatcatagaagccgccaaatccgccggagcggacgccattcatccgggctacgggcttctgtcagaaaacagcctgttcgccgaacgctgccggaaggaacaaatcacatttatcggtccgcccggtgatatcatcgccaagatgggcagcaagatagaagcccgaaaaacgatgcaaaaagcaaaggtcccgatcgttcccggtgtttcagagccattgcccgatgttcactccgccttagccgaagcccgtgccatcggttttccggtcatgctgaaagcttccgcaggaggaggcggaatcggcatgcagatcgtacattcagaagaagagctggccaaagcgtttgaaggcaatcaaaagcgggccgcgtccttttttggagacggcgcaatgtacatggaaaaggtcattgaaaatgcccgtcatattgaaattcagatactcgcagattctttcggcaacatcgttcatctgtttgaacgtgactgttcagtacaaaggcgccaccaaaaagtgatagaagaagcgccgtcgccgtttgttgacgatgaattaagacgaagactcggtgaaaccgccgttaaagccgctaaatcgatcggctaccaaaatgcaggcacaatagaatttctcgtcgaccaaaagaaacaaatctattttttagagatgaacacaagactgcaggtggagcatccggtgacagaagaaattacaggactggatcttgtggaagaacagctgaaaattgccgctgggcaggcgctgactttctcgcagaaagatatcaaccaccgcggtcatgcgattgaagtgcggatctatgcggaagatccggtcaccttttacccgtcacccggtaccatctcgtctttttccgttttaagacacccgtcagtgcgacacgaatgcgccgtcgaaaagggaagcgttatttctccgttttacgatccgatgattgccaaaatgatcgtcacggcgaatacgagaaaacaagccattgaacaactgaaaaccgcccttggcgaatatcatgtagaagggattaaaaccaacattccgctgctgacaaaaattgccctttcagaagtgtttgaaaagggcgaggcaacaaccggttttttacaaacaatgaacgagggggcgtcaaaatgagcgtcataaaaattcagatggcgggaaacctgtggaaaattcatgtgaagccgggtgatgtcgttgaagaaggacaggaagtggctatcttggaatctatgaaaatggaaattccgattatcgctgatgcagcgggtacggtgaaagaagtgaaaaaatcggaaggtgatttcactgatgaaggagaggtcctgattgaacttcaataaaaaaggaggtgcagcatgaactgtccgaaacatgtccgcatcaatgaagtaggaccgcgtgacggcttgcagaatgaatcggcgtgggtagatacagaagataagattgagtggatcaatatgctgtcaaaaacaggccttccctatatcgaagtgacatcattcgtgcatccgagatggattccggctcttcgtgacagcctggacgtcgcaaaaggcattgccagatctgaacatacggtctacgcggctctcgttccgaacctcatcggactggagcatgcggcagaaggcggaatcgatcaggcatgtgtatttttatctgcaagcgaaacccataaccaaaaaaacgtaaacaaaccgattgaccggaccgttcaagagctcaggcgggttattactgaagcaaaagctgaaaaaatggcgacgagagcttatctgtccactgtgttcggctgtccgtacgaacagaacgtgccggtcgaacaagtcatccgcctgtcagacaccctgctcgaaatgggtgttgatgaaatttcgctcggcgacacgatcggcgcggcaaatcccttgcaggtcatagccgtgcttgaagcccttttgccgagaattcccgcctcaaaaatcgcactccatttccatgatacaagaggaacggctctagcgaatatcattcccgctcttgatatgggcatcacatcctttgatacttcctcaggcgggcttggcggctgcccgtacgcccctggatcagcaggcaacgctgccacagaagacgtcatttatatgctcgaacaaatggggattgatactgggacggacatgaataaacttctttatgccgccggctggatcgcggataaaataggcaaagacctgccaagcagaaacctgcaggcattcagaacgaaatgagaaaggagaagccatggaagattgcgtcttgtattccgtctgtcaagaaacgatcggtctgatcacgctgaaccgcccgcatgcggccaactcgctgtcttcagaaatgattgatcatttacagcgtgtgattgaagacatcaaaaacacgccatccattcgttgtgtcattctcaccggcaacgggaacacattttgcgccggtgctgatttaaaagaaagagcggggatgaatcatgaacaagtcagacaaagcgtcaggcgtatcggtgaaacggcagcatccattgaagctctcccgcagccagtcattgcagcgctgaacggaaccgctgtcggaggaggccttgaactcgctctcgcctgcgatatcagaacagccgtcagccgggcgggcctcggccttcctgaaacagggcttgcgatcattcctggggcgggcggaacgcagagactgccccggcttatcggccccggcgcggcaaaagaattgatctataccggccgaaggctttctgccgaagagggaaaagacatgaagctgatcgagcatgtttatgaagacgatgaacttatggaaaaagcaaaagcactggccggccgcatcgccgctaatgggccgatcgccgtcagacaagcaaaattcgcgataaacaagggtctggagacagatctcaatacagggctcgaaatcgaacgaaaagcatatgaacaagtcatccccacacttgacagagaagagggcctgcgcgcttttaaagaaaaaagaccccctgaatacaaaggaaaataaaacatggagggactcggatggattacgaaaaagaacggcagacacgcagcaaaacgatagaaaagggaggagccgcgaaatatcatgcaagcaacgaaaagaagggaaaactttttgtaagagacaggctgaagcttttattcgatgacggcatatctgttgaagacgcttttttcgccgagtgcatgtcagacggactgccggctgacggggtcgttaccgggatcggaaccatcggcggcagaaccgtttgtgtgatggcaaacgactcaaccgtaaaggcgggctcgtggggcgcgaaaacggtggaaaaaatcatccgcattcaagagacggcggaaaagcttcagtgtccgctcttgtacttagtcgattccgcaggtgcgagaataacggatcaggtcgacatgttcccgggcagaaggggagccggccgcatcttttataatcaagtaaagctgtcgggccgcattccgcaaatctgtttattgttcggcccttccgctgcgggcggcgcttacattccggccttttgcgacattgtcattatggttgaaggcaatgcatccatgtacttaggttctccgcgtatggcagaaatggtgattggcgagaaagtatcgcttgaagaaatgggcggcgcccgtatgcattgttccgtatcaggctgcggtgatctcctcgcccggacggaacaggaagcaatcatgatggcgcagacatatctcagctattttccgtcaaattatactgaaaaagcgcccgtcaacaaatctaagaacccgaaggcttttgaaaaaccgctctcagatgtcattccggcacatcaaaacgcaccgttcaacatgatggatttaattgaacgtgtcattgatgaagactcattttttgagattaaaccgttatttgcgcaggaattaataacggggcttgcgcggattcacggacagccggtcggcattatcgccaatcagccgcgtgtcaaaggcggggttttatttctcgattcggcggataaagccgcaaaatttatcgctttgtgcgacgcattccatattccgcttctgtttttagcagacattcccggattcatgatcggaacgaaggttgagcaggcgggcatcatcaggcatggcgcaaaaatgatctccgcaatggcggaagcgactgttccgaagctttccgttatcgtcagaaaagcctacggtgccggattatacgcgatggcggggcctgcttttgaaccggactgctgtttagcgcttccgactgcgcaaattgccgtaatgggtcctgaagcagcggtgaatgcggtctacgcaaacaaaatcagcgagctcacacctgaagaaaggccggcttttattcaagaaaagcgtgatgaatataaggaagacattaacctttaccggcttgcctctgaaatggtgattgacggcattgttcctgctgattccttgcgggaagaactcaataaacgcctcactgcttacatgtccaaacaactgacattcacacaccggaaacaccccgtatacccggtataaataaaaaaagactgcatagatccggctcgcagccgttcttatgcagtcttttttcacagtcttgatctcattttcttcacaacaaaataaacaacaataaatacgagagccaatataatgatcggagttgtatacattccggcatagctgtctacgtctttccactgtcccccgagctgatacccgagataaacgaaaatgacagaccacggaataatggcaagcgtcgtcaatatgacaaacttggaaagaggcattttcgcaaggccggccgggatggagatcgcatgtctgacgaccgggataaaccgcgccgagaacacaacgccggcgccgtaacggcgaaaccagttttccgcaacatcaacatgatgctttttcagaagtaagtacttgccgtacttgtccaaaaacggccgtcccccataacgggcgatccagtaaataaagcactgcgcgatcgttcccccgatcacaccggcgacaatggcgccgataaagctgatcgtgccttctgacaccatatagcctccgtaagccagaacgatttcactcggaatgatttcgatcattaatccgagcgcaatccctaaatagcccatacttgtcagccaggataatatttcactaataaaattgcccacactgttcacaacctctttatctttttacccaattatatgactgattgacaagcaaaatggttacaaattattttttaacgcacgctttcttcagattctctttttaacacctcttctaaataagctaaaagtttcggtctcatttcttcccgcagaagcccgatctccgtgccggccttaaaacagccgaacttatctcctatatcaaaccggcttccttcaagctcccgcgcgtaaatgcttcgggtgcggcacacttcgcgcagcgcgtctgtcaattggatttcgttgcccgcgccttttccgatcgtcttcagcgctttaaaaatggcaggggttaatatgtaacgtcccatcacggcaatatgagagggcgccttttcaacagccggtttctcaatcagatcctcaacctggtacacatgaccgctctgccgccccgtctgtataataccatatttgctgacatcagcaggatcgacgggctgtacgccgaccgtttctgtaccgtgttggttatagacatctatgagctgtgaaagagcgggagtatcagataccataatatcatcacctaatagaacggcaaaaggctcatctccgataaaatgctccgcacacagcaccgcatgtcctaatccgagcggttctttctgacggatgtaatgaatattggccaaatcggcaatccgctgcatttccttcagcgcctccgtcttgcctttttcctcaagattgaattccaattccgccgaccggtcaaaatgatcttcaatcgagcgtttgtttctccctgtaataatcaatatatcttcaattcctgccgctgcggcctcttcgacaatatattggatggccggtttgtcgacaatcggcagcatttctttcggctgcgcctttgtcgccggcagaaatctcgttcctaaacctgctgcgggaatgaccgcttttctcactttttttctcattcatcttcactcctgatcctgtatgtttttcagcgaatctccaaatacccagattcggtttccgataaaattcatcatcattccgccgatagtggcggcgaacttactcaccaatagcgaacagccacctttttgaaacgcgtaaagcagcaaaaaggtgattcccgacgcggcaagattaatcatgagaaatcgcatgatctctttcccgtcagccttgcgttttacacgaaacgtccacttccggttccatacatagctgttgatgatccctgccgaataggagcagatctgcgccggaagataggggacatgacaagcggcgagaagaaagaagacaccaaaatcgatcagcgtattgccgacccctacagtgcaaaaacggcctgctgtctttactttttctttcagcataacggtgacctcccctcataataagatgcggttcgctgtcctatttgttgatatggattactttagcggacagtgttgaataaacaattactaaaatatgaacaaaacatgaaaacgtaatgaggctttgcaaaactcattaagttaacagtttgatagtttaggttgacatattccgtagagggcactaatattctgtataagtgttaaccttctattattttggttaacattaattttcaaagtaagagaaaggaggggaatatatgcgggaagaaacctattacagcgtcagaatgagagcttccctaaacgccccccatgagcagggcggaaaacacatttccggcggagaacggctcatcacttacagcggtttacaggaagcggtagatggcttattacataaaggcttctcgcactcaagagggatacctgattttatgcagattcagcttgaaagcgttaatgaaccgatcgaaacgatccgccctttgccggttgctttccatcaaacagacacgccggaaaaaggacaagcaatcgcccgcaagcttctgcaaaaggcggggattcccccgcacatgatagagaaagcgtatgaaaacattgcggaatatgcagaagcaagaggagcggttctgtttgatatccgggcaggagaacgcattgacggcagaggaaatagaggtgtgcgggtatcccgagtggattggccgtcacatgattttcaaaaatgggcttttacgcacaacatgccggaaaattcacgaataaaagaagcacatgccatcgcggcaaaagtttgcgcatatccggagattattgctgaattgtgctggtcggatgaccctgattacataacgggctacgttgccgcaaagaagctgggatatcagcggattgccaagatgaaaaatgccggagatgaatgcggctgccggattttttttacagatggctccatagatacggagagctgtatccattttttagagaagcagcctgtattcattcagcgggaggagaaatgatgaaacaatcaatgattgaaaaaagcaaaaagcatctttggctgcctttcacacaaatgaaagattacgatgaagatccgttaatcattgaaagcggaaacgggatcatgctgaaagacatcagcggcaaagaatattatgacggcttttcttcagtatggctcaatgtacacggccaccgaaaaaaagaaatggatgaagcgattcaaaaacagcttgaaaaaatcgctcattcgaccttgctgggtatgacgaacgttcccgcaacagaacttgccgagatgctgacaggcatcacaccggaaaagctgacacgcgttttttactccgacagcggagcggaagcaatggaaatcgctctgaaaatggcctttcaatactggaaaaacatagggagacccgagaaacagacatttatttctatgcagaacggctatcacggcgatacgatcggagccgtcagcgtcggctccattgaactcttccaccatgtgtacggcccgctgatgtttgaaagctacaaagccccgattccgtatgtatacagatctgaaagcggcgaccccgtacagtgccgggatgaatgccttcacgcgctcgaacagctgcttgcaaagcaccacgaagagattgccgcacttacgattgaatcgatggtgcaaggcgcatccgggatgatcgtcatgcctgaaggctttctggcaggcgtacgaaagctgtgcacggcatatgatgtgttaatgatcgttgacgaagtggcgacggggttcggccgcaccggaaaaatgtttgcctgtgagcatgaaaatgtccagccggacttgatggcggcagggaaaggcattacgggaggctatttgccgatcgctgtgacgtttgccacagaagccatttatgaagccttctacgatgactacgacaaaatgaaaacatttttccacggccattcctatacaggaaatcagcttggctgtgccgcggcaattgaaaatctgcgtttattcgaatcagagcgcatcgttgaacgagtcgccgaaagatcaaaaacggcagcgaaatttcttcatggtctgaagcagcttcctcatgtcggcgatgtccgccagctcggtttcatgtgcggcatagagcttgtgcaggataaggggacaaaacagccttatctgcctgaaaagcggatggggtacaaggtgtccttgaaaatgagagagcttggtatgctgacacggccgctcggagacgtcatcgcctttctgccgccgcttgccagcacaaccgatcagttacaagccatgatctccattatgaaagaagcgatagccgaggtgaccggccgtggattttgacggatggctcctcggaaggctcgatgcggtgaaaagagacgggctgtatcggacgctgcgaacacaggaaaccgctctcaaaaccaaagggcaaaagcggcagacctgggcgtccaatgactatttaggcctgtcaaaagatgagcggctgatcacagccgcgcaaacggcgctgagccggttcggagcgggaagcggcggctcacggttaacgacaggaaatactgtgtggcacgaaaaacttgaacaaacaatcgcggactttaaacagacggaagcggctttattgttttcaagcggttacttggcgaatatcggcgtgcttgcctcactgcctcaaaaaggcgatgtcattttaagcgatcaactgaaccatgcgagcattgttgacggctgccgtttatcaaaagcggaaaccatcgtgtaccgccatattgatatggctgatcttgagaaaaaacttgcttccgtccaggctcggaaccgccgcttcatcgtcacagacggcgtcttcagcatggacggcaccatcgcgcctcttgaccgcataatggcgcttgcaaagcagtaccaggcatttgtgatagcagatgacgcgcatgcaaccggtgtactcggggaaaacggcgggggaaccagtgactatttcggtgtttgtccggatattgtcatcggcacattaagcaaagctgtaggaacggaaggcggttttgccgcgggatcaaacattttcattgattttttgctgaatcaggcgcggacgtttatttttcagacggccctcccgccgtcaatttgtgcggcttcacatacggcatttgacatcatatcagatatgcacgatacgcgccgtgagctgcaatcatctgtcaaaacgataaaaacgcggctgaccgatatgggctttaccgtaagaggcggagatacaccgattatccccgttatcatcggtgatgcaaaaacagcggtttcagccgctgcgctgctggagaaaaagggaatctgcgccccggccatccgcccgcccgccgttccggaaggcgaaagcagaatcaggctgaccgttacggcggatcgcagcttacaggacatagacgagctgacagaagcatttgattccattagaaaagagctgaatttaaacaaatgagaagtttttttgttacaggaacagataccggcgtcggaaaaaccatcgtttcttgcggacttgccgcggcattccggcagaaacaggcggatatcggagtgtttaagccgtttttaagcggtgtgccgcggactcatccggaaagtgacacctcgctcttgaaagacatgtcacaaaccgcactgtctcatgaagaaattacgccatttgaatggaaagagccgcttgcgccatacacggccgccatgcttgaggggaaatccgtgagcatggcggatgtcatggcccactggagtaagatcaaaaatcgtcatgagtgtttcatcgtcgagggggcaggcggcatttccgtcccgcttggtgaaaattacttagtcagtgatctgataaaagccatggaattgccggcagtgattgtcaccaggcctgatctcggaaccatcaaccacacatatttaaccgttgaatatgcgaaaaacatggggatagaggttctcggcattattatcaacggcgtaaagagcaacccggggctggacgaaaagacaaacccgagcatgattgaaacattatgcaaagttccgattttgggaatcacaccgaagctggatcacgtttcaccggaaaacattcaacacatgattgagaaacatatagatgttacctctttcatgaatctgacacaaatggggagataaacatgaatcaatggatggatcttgcagagagagtgctggacggggcggaagtaacgaatcaagaagcgctggccattttaaattgtcctgatgaggatcttttattgctgatgcatgccgcttttcatatcagaaaacgattttacggaaaaaaagtaaagctgaatatgattatgaatgcaaaatcaggcctgtgtccggaaaattgcgggtactgttcacaatcttcaatatcaaaagcgccgatcgagtcttatcggatggtggataagcatatattgctaaagggggcaaaacgcgcccacgacctgaatatagggacatactgtatcgtcgccagcgggcggggaccgtcaaacagagaagtagatcaagttgttgatgctgtcaaagaaattaaagaaacgtacggtttaaaaatctgcgcatgcctcggtctgctgaagccggaacaggcagagcggctgaaacaggcaggagtagaccggtacaatcataacatcaatacatcacaaaggaatcactcaaacattacgacctcccacacgtatgacgacagggtcaatacagtggaaacggcgaaacaatcggggatgtcaccttgttctggtgtcatcgtcggcatgaaagagacgaaacaggacgtcattgatatggcgaacagcttaaaagcgcttgacgccgacagcataccggttaattttctgcatgcgattgacggaactccgttagaaggggtaagcgaattacatccggtgtattgcctgaaagtgctcgccttgttccgttttatcaatccgtcaaaagaaatccgtatctcaggaggccgggaagtcaaccttcgttcgctgcagccgctgggactttatgccgcaaattcgattttcgtcggagattacttaacgacagcagggcagcatgaaacagaggatcatcaaatgctccatgatttaggttttgaagtcgaatccgttgaagaaatgaaagccggcctgcaatccgcctgcaatacggaggtataagatgacggcaggcctatcgattgcacatccgtctctccatgcggattcggatttttggaatgacccttacccgttttatgacaaactgcgatccattgatcctgtttataaaggaaccgtattaaaatatccgggctggtatgtcaccgggtacaaagaagcggcagcgattctgaaagacacccggtttaaaaaccgcattcctcttccggaagcttcaacgaaatatcaaaatctatcgcatatccagcacgatatgctgttatttaaaaatcaatcagaccataaacggatgcggatgcttatcggtaaagaatttaccgcaaagacggcggaatcacttcgcccctgtataaaagaaacggttcatgacttgttggatcaagtccaaatcaaaaaaaacgctgaccttgtttcagagtttgcctttccattggcaagccttatcattgcggagatactcggagtgccgaaagaggagagatatcaattcagacaatggacggcagacgtcattcaggccattgatcttacccgatcaagaaagacgttagtcagagcaagcgacaccgcaggcaggctcacgtcatatttcagagatttgattcacaagcggaaagctcaccctcagcaagacttgatcagcaggtttattatggaggaacagctttcaaaagaggaagtgctcgcgacatgtatcttacttgtcatagccggacacgagacgacggtaaacctcatgagcaacggtgtgtttactttattgaaacacaatgaacagcttagcgcactgagagaaaacccctcgcttattgaaactgcagttgaggagtgtctgcgctacgacagccccgcgcagctgacggcacgcaccgcctcagaagactgcgaaataaatgggaaaaccataaaaaaaggagagcaggtatatatccttttaggggcagccaatcgcgatccaagcatattcgatcagcctcacaaaatggatatccaaagaaaaccgaatccgcatcttgcattcggaaagaacgcccatttttgcataggctcctcattagcgcgcatcgaagcacaaattgcaattctcacactgtttgagcggatgcctaagcttcggctggccgcacaccgccttgaataccgcaagctcattggttttaggtcgctcaaagagcttccggttgtcattggctgaataaccaggcaggagggccggattttatcggttcctcttgcaggaaataaatgaaagaaaaaagaatacatatttataaagcaaaaatcctctctgatccatctcactatccctaaaaaaactcactgctcagccaatcaatataatgcagcaagggtctccttttctttcgccaaaacggaacattcaccatgatgcacatttttccagcctcaaaaactgtgcaaaaccggcatgtttttgctttattttctcgatttttgtaagcgcttactagtattgagcagaaaagagggggatttgtggacattgttattattttattggcattaggcatgctgatgtttgcggcttaccggggcttttcagtcattttattcgccccgatttgtgcgctgtttgctgtgctcctgacagatccaagcttcgtacttcctttcttctcgaatatatttatggagaagatggtaggatttattaagctgtattttcccgtatttcttttaggggccgtttttggcaaggtggttgaaatatcggggctcgctgagtcgattgcaaaaacaatcgtcaggcttgtgggagcaaaaagagccattctcgccatcgtcttaatgggtgcgattttaacgtacagcggcgtcagtctattcgtagcggtgtttgccatctacccgtttgctaaaaacctatttatgaaagctgatattcccaagcgtctgataccgggaacgattgcattgggcgcctttacatttacaatggatgctcttcccggcacaccgcaaattcaaaatgtcattccgacagctttttttaaaacaaacatttatgccgccccctggctcggactgattggtgcagcatttgtgcttacggccggaatgatttatttagaatcccggcgcaaaaaagcggccaatgccggagaaggctatgctggatttcaatctgaagtttccgctgcagaggaatcctcagctctggctaatgaaaaacatacgcctgttttaccgcaggaggcagaacccagccccgcgcggcaagtgctcgcctttgttccgcttatccttgtgggggtcatgaacaaatgcttcacgatgtggctcccgcattggtaccctgacggatttgattttgcgccgctcggcttagaagcgttcgggaaaattgacctttcctccgtcactgcgatctggtcagtagaactcgcactgttcatcggaatcatgacaacgattttgttcgattggaaaaaagtcctcttcaatttgaaagaaggactgaatgagggcatcgggggcgccttgctggcgtcgatgaatacaggagccgaatacggatttggcggcatcattgcggcgcttcccggctttaaaatggtcagcagcggcatatcgcagacgtttactgatccgctcgtcaacggagcggtgacgaccactgcgcttgccgggattacaggatcggcatcaggaggaatgggcatcgctttaagcacgatgtcagcagcgtatacagaagcaatcaatacattccatatcccgccggaggtcatgcaccgggtaatttcgatggcctccggcgggatggacactcttccgcataatggcgccgtcattacgctgctcgcggtcaccgggttgacccaccgccaatcctacagggatatctttgccattaccgtcattaaaacagccgctgtgtttgtcatcatcgccatttacagtctgacgggccttgtgtagccaaaacagaaaggggaaacgaatatgggaataggaaaagtaatggactcttatcaagatgctgctgcactgatcaaggacggagacaccctcatcgcaggaggcttcggcctgtgcggtattccggaacaattaattctcgcgatcagggacagcggcgtaaaaaacttgaccgttgtcagtaataactgcggtgttgatgattggggtttaggcctcttgcttgcaaaccggcagatcaaaaaaatggtcgcatcctatgtgggagaaaacaaaacctttgaacggcagtttttaagcggggagctggaagtcgaattggtgccccaaggaacgctcgcagaaagaattcgcgcgggaggggcgggcattccggcgttttatacacctgcgggcgtcggaacatcagtagctgagggaaaagaacataagacatttgacgggcgcacctaccttctggagaaagggattacagggaacgccgccatcgtaaaggcctggaaagccgatcctctaggcaacctgatgttcagaaagacggcaagaaatttcaatccgctcgctgcaatggcaggcaaagtgacgattgcagaggctgaagaaatcgtcgatgccggagagcttgatccggatcaaattcatacgccgggtatttttgtgcagcacgtgctgcacggcgggattcatgaaaaacggattgaacgccgcaccgtccggcaagcatgataaaggaggctgacagaatgagagatagcagaaaacgaatgatcaaacgggctgtaaaggaaattaaggacggaatgaatgtgaacttggggatagggatgccgacgcttgtagccaatgagataccgaatgattataacgtcctgcttcagtctgaaaacggcttgctcgggatcgggccttatccggcggaaggaacggaggaccccgatctgatcaatgcgggaaaagaaaccattaccgaagtaaagggagcctcgtattttgacagtgccgaatcctttgccatgattcgcggcggccacattgatgtagcgatcctcggcgggatggaagtgtccgaacggggagatttggcgaactggatgatccccggaaaaatgatcaaaggaatgggcggcgcaatggacctagtccacggagcaaaacggattattgtcattatggagcatgttaataaatatggggaatctaaagtgagaacggaatgtacgctgcctttaaccggcaggcaggtggtcgatcggctgatcacagatttggctgtattcgattttcatgatggccgtatgacgctcaccgaactgcaggaaggtgtaacaatggaagaggtctttgagaaaacagaaggtcattttactgtcagccagtcgttaaaaaacggggtcagaccaaaatgaggaggtgccgtcatgcattcattgcttattgaaaaaacagccgttgtaacaggagcagccggaggaatcgggcttgaaatcgcaaaagaattcgcccgtgaaggagcagctgtcatcatctctgatgtaaacgaacaagcagggaaagaagcggcggcaagactgacagatgaaggctgtgaagcagtcagcatcacatgcgatgtaacaaatgaaaagcaagtggccgacatgctgcagacggtcgagaaacaattcggacgtctcgatatccttgtgaataatgccggcattcagcatgtcgcgcccatcgaggaatttcccaccgaacagtttgaacggctcattcgtctcatgctgaccgcgccatttatcgcaatgaagcatgcatttcccattatgaaaaaacagcaattcggtcgaatcattaatatggcatctgtcaacggactgatcggttttcacgggaaagcggcatataacagcgccaagcacggcgtcatcggtttaacgaaagtcggcgcacttgaaggcgcggctgacggtattaccgtcaatgcgctttgtccgggatatgtggacactcagcttgtccgcaatcagttaaaggacatttccgcaacaaggaatgtaccgtacgagcgggtgcttgaggacgtcatctttccgctcgttccccaaaaacggctgctgtcagtgaaggaaatcgctgattacgccgtatttttggccagcgacaaagcaaaaggggtcacaggtcaggccgtagtcatggatggcgggtataccgctcaatagttcttatccttttttaaaaaacagccgctctgaacggctgtttttttatgcctgaaaaccttgttcactcaataggccgattactgcgtcaatcggtatccagtctgggtcattcacatgttctgcagcgtatttcgcccttgcggattttccccatccagatccatctcttgcgccgcatttataatcaagcgcaatcagtttacaatccttcacagatatacaaatgaatttttacaataaacagaaaatatgtaatttctgacacaataatgccaatagccctaaaacatatgaaacatgaagagcgcgttctaagtgaagaagagccggtaacaggctccacgccggctttcatcatctctctttaagactgattttcggtgaaacccccatgttttattttatgaataaatatatctaattcgtttgtgaaaacgaacaataactcctccgaaagtattctatacacatttgttataatcatgctaggatgttagataaagggatattttgtaggatattgtatcccttgttcaatatgatcggaggaatctcatgaacaatcttgcctttttatttcctggacaagggtctcaatttgtaggaatgggcaaacaattttggaatgattttgtgctcgcaaagagattgtttgaagaagcgagcgatgcgatctccttggatgtaaaaaaactgtgttttaacggaaatatgaatgaattgacaaagacaatgaacgcgcagcccgctattttaacggtcagtgtcattgcttttcaagtgtatatgcaggaaataggggtgaagccacgcttcctggcaggccatagcttaggcgaatattcagcgcttgtctgtgccggcgccctttcttttcaggatgccgttacacttgtaagggagcggggaattcttatgcaaaatgcggatcctcagcagcagggggcgatggccgccgtgacacagctctctctccaaaccttgcaagaaatatgttcgaaagtgtcgacggaggactttccggcaggtgtagcctgcatgaattcagaacagcagcatgtgatttccggacaccggcaagctgtggaacgtgtcatcaagatggcggaggaaaagggtgcggcatacacttatttgaatgtcagtgcgccttttcacagttcgatgatacgatcagcctccgaacaattccagactgtattacaccagtattccttccgggatgccgcatggccgatcatttcaaatgtcaccgcacgcccttacagcagcggaaattcgatcagcgaacatctcaagcagcacatgacgatgccggttagatggacagaatcgatgcattacttgcttttacatggagtcacagaagtcatcgaaatgggtccgaacaatgtcttagccggtctgctgagaaaaacaacgaatcacattgtaccttatcccttaggacagacatctgatgttcccccgctttccaattcagcggaaagaaagaaacatattgtccatttacgcaaaaaacaactgaataaattgatgattcaatccgtcattgcgcgaaattacaacaaggattcagcggcttattccaatatgacgacgccattatttacgcaaatccaagagctgaaagagagaatgaaaaggcatgaagacgtgctttcagaacaagaactcgaacattcgatccatttatgcaaattaatttgtgaagctaaacagcttccggcttgggaagaattgcggattttaaaataaagcgcccaggaggggacctatgtataccagtcaattccaaaccttagtagaagtcattcgggaaagaagcaatatctctgatcgcgggatccgttttatcgaatccgataaaaacgagacggttgtctcttatcgccaattgtttgaagaggcgcaagggtatcttggctatttacagcatctcggcattaagccgaagcaggaaattgtatttcaaatccaagaaaacaaatcatttgtcgttgctttttgggcttgtatattaggaggaatgattccggtgccggtcagtatcggagaagatgatgaccataagctgaaggtctggcgcatttggaatatattaaatcatccgtttctgattgcctctgaaaaagtattggacaaaataaagaaatacgctgcagaacacgatttacaggatttccatcaccaattaaacgaaaaatctgacatcattcaagatcaaacctacgattaccccgcttcattttatgaacctgatgcggatgaactcgcctttatccaattttcttccggatcgacaggagatccaaaaggagtcatgttaacgcatcacaacttaatacataacacgtgcgccattgggactgccctacacgttcattcgaaagactctttcttatcatggatgcctttgacgcatgatatggggctcatcgcctgccaccttgttcccttcataaccggaatcaatcaaaatctaatgcctacagagttatttattcgcagacctattctttggatgaaaaaagctcatgaacacaaagccagtattctctcatctcctaatttcgggtacaactacttccttaaatttctgaaaaacgaaccagactgggatttatcccacatcaaggtcatcgcaaacggtgcagaaccgatattgccggagctgtgtgacgaatttttgaaaagatgcgcagcattcaatctgaaaagatccgccattttgaatgtttacggtttagcggaagcttcggttggcgcagcgttctctaaaataggtaaagaattcgttcccgtttatttgcatcgtgactatttaaatcttggtgaaagagctgtaaaagtcagcaaagaggaccaaaattgcgcttcattcgtcgaggtgggacaacctattgactattgtcagcttcggatctccgatgaaacaaatgaaagagtagaagacggaatcatcggccatatccacatcaaaggagacaatgtgacgcaagggtattacaacaaccccgagagtacggaaaaagcgctgacttctgacggctgggtaaaaacgggagacctcggatttattagtgaaaatggtaacttagtcgtaaccggaagagaaaaggacattattttcgtgaacggaaaaaatatctacccgcacgatattgaacgggtcgcgattgaaatggaagaggttgacttaggtagggttgccgcctgcggtgtatatgatcaaaagacacaaagcggagaaattgtgctctttgttgtttacaaaaaatcacctgaaaaatttgcaccgcttgtcaaagagataaaaaaacatttgtacaagcggggcggctggagcataaaagaagtccttccgatccgaaaactccctaaaacaaccagcggaaaggttaaacgctacgaacttgccaggcagtatgaggcagggaatttttcaccagagtctgccgccatcaatgaatgtttggagagcagcccgaaaacatccggacagacacccattcatgagatagaaacggaattgctgtctatcttttccgaagtgctcgatggaaaaaaggttcacctcgctgacagttattttgatatgggagcaaattcattacagttatcgcagattgccgagcgcatagaacagaaattcggacgcgagcttgccgtttcagatctctttacgtatccttctatcactgatttagcggtatatctgtctgaaagccgggctgaaatcaagcaggacgcggcagcgaaaccaagccatgtgacaccgaaagatatcgccattatcgggatgtcgctcaatgtcccgggagcatcaacgaaaagtgatttttggaatctgcttgaaaaaggtgagcacagcattcgagaataccccgaatcccggctgaaagacgcggctgattatttaaagtccatccaaagcgaattcaatgagagtcagtttgtgaagggcggctatttagatgaaatcgaccgctttgactattcgttcttcggtttagctcctaaagcggctcagtttatggaccctaaccaaagactgtttttgcagtctgcatggcatgcgattgaagatgcgggctatgccggcggcagcatgaacgggagccgtgtcggggtatatgcggggtactcgaaggtgggctacgattatgaacgtctcctttctgcgaattatccggaggaacttcatcaatatatcgtgggcaatctcccttccgtgctagccagccgaatcgcttatttcttaaatctaaaagggccggcggtcacagtggatacggcatgctcctcatcgcttgccgccgttcatatggcatgtaaatctttaatgtccggcgattgtgaaatggctcttgccggcggtatccggacatcgctcttgccgatctgtatcggacttgatatggaatcttcggacgggtacacgaaaacgttcagtaaagattcagacggcacgggcacaggtgaaggcgcggccgcagtcctgctaaaacctttgcaggatgctgttcgcgacggagaccatatttacggcgtaatcaagggaagcgcgctgaatcaagacggaacaaccgccgggattacagcaccgaatccggcagctcagactgaggtcattgagacggcctggaaagacgcgggcattgctcctgaaacgctatctttcatcgaagcgcacggcaccggaacgaagctcggcgatccggttgaatttaacgggctttgtaaagcatttgaaaagtacacggcaaaaaaacaattttgtgcgattggttctgttaaatcgaacatcggtcatttgtttgaagcggcaggcatcgtcgggctgatcaaatctgtcctcatgctgaatcacaagaaaaatccgccgttagcgcactttaatgaacctaatccgctcattcattttcactcatcaccattttatgtgaatcaggaagtttcggagttcacatcgggtgatgagccgctgcgaggcggagtcagctcatttggctttagcggaacgaacgctcatgtggtattggaagaatatatttctcaaagtgagtatgcacccgaggatgaacatgggccgcacctatttgttttatccgctcatactgaaaaatcactctatgaactcgcacagcagtaccggcaatatgtatcggaggacagccaagcttcattaaagtccatttgctatacagccagtacgggcagggctcatttggatcatggcattgccatgattgtatccggtaagcaagaattatcggataagctgacccgcctgattcagggagacagaaaccttcccggtgtatacatcggttacaagaatatgaaggaaatgctgcctgctcataaagaagagctgaatcaacaagcagccgctctgattaagcagcgtttacgtacgcaagatgaacggatcacatggctgcatcgcgcagccgaattatttgtgcaaggagccgttatcgattggcgcgcgctgtattccggtgaaactgtacaaaagacgccattgcccctgtatccgtttgaacggagccgatgctgggctgaagctgaccagttgcgcttaaacgagggcgaaaagagaggagaagcggcattgaatatcaatcaatcgaaggcgcatattgaatccttcctgaaaactgtaatcagcaatgcttcggggatcaggggagaggaactcgatctgaatgctcattttatcgggctcggaatggattctatcatgctgtcacaggtcaaaaaagccatcgcggacgaatttggggtagatatcccgatggatcgtttttttgatacgttgaccaaccttcaaagtgtcatagattacttggctgataccgttccatcgtcctttgcatccgctccgcctcaagagaatgttccggcgcaggaaaaacaggtcatttcagaagcgcagcctgaatcggatcgcagagatggtcatcaagagcatacgctcgaaaaaataatcgcatctcaaaatcaattaattcaggatgccttgcaagctcaattaaatagctttaatttgctgagaaacagcggacatcattccgatgagaaagaatacgctaaagcgcaagagaaatcaattccttctgtcaagcaggggcctccgaccgtcactgcagaacagaaagcggctcaagaagcgaaaccctatgttcctttccagcctcagaacctgaatgatcagggacactataccgcacggcaaaaacaatacttagaagacttcatcaagaaatacgcagataaaacgaaaggttccaaacaatatacggacaacacccgatttgctcatgcaaacaaccgcaatttgtccagcttccgttcgtattggaaggaaatcgtatacccgattatcgccgaacgttctgacggttctaaaatgtgggatattgacggaaatgaatatatcgatatcaccatgggattcggggttaaccttttcgggcatcatccttcctttattacacaggttatcgatgattcaacccgttcatcattgcctccgctcggcccgatgtcagatgtcgccggtgaagttgccgaccggatccgcacatgtaccggagtggaaagggtcgctttctataattccggaacagaggccgtcatggttgccctgcgtttggcgcgggcggcaacaggaagaaagaaagtcgtggcgttctcaggatcttatcacgggacgtttgacggcgtattaggggttgccggcacaaaaggcggggctgcgtctgcgaatccgctggctccgggcatactgcagagctttatggatgatttgattattttacattacaacaatcccgattcgctggacgtgatccgcagtcttggtgatgaattggcagccgtactggtggaaccggtacaaagccgcagaccggatttgcagccgcagacatttttgaaagaattgcgggcgatcacgcagcaatccggaacagctctgattatggatgaaattattaccggttttcggatcggtcttggcggcgcacaggaatggttcggcattcaggctgatttagtgacctacggaaaaatcatcggcggcggacagccgttaggggtagttgccggaaaagctgagttcatgaatgcgatcgacgggggtacctggcagtatggggacgattcctacccgcaagacgaggcgaaacgcacgtttgtggccggcaccttcaatactcacccgcttaccatgaggatgtcattagccgtccttcgccatttacaaaccgaaggagaacatctgtatgagcagcttaatcaaaacacagcctacctggtcgatgagctgaatcgctgcttcgaacaagcgcaagtgcctatccgcatggttcgattcggttctttattccggtttgtctcatcgcttgataatgacttgttcttttaccatctcaactataaaggggtctatgtatgggagggacgcaactgcttcttgtctgcggcgcataccgcggatgatatcgaaaatattatacaagcggtgaaagacacggtggaggatcttcgccgaggcggatttattccggaaggcccggattcccctgatggcggaggccgtaaaaagtccgggacgcgcgagctttcacctgaacaaaagcagttggttatggcatcccattacgggaatgaagcttccgccgctttaaaccagtccattatgctgaaagtgaagggcgaactgcagcatacgccattaaaacaagccgtccggcatatcgttgaccgtcatgaagctttacgtacggtgattcatcccgatgacgaggtacagcaagtgcaggaacggatgaatatagaaataccagtcattgattttaccggtctcccgcatgaacatcgggagccggaaattcaaaaatggctgacagaagatgccaagcggccgtttcatttccatgaacaaaagcctttgtttagaatccatgtgcttacatcggctcacaatgaacatctgattgtgctcacgttccatcatatcattgccgatggatggtcaatcgccgtttttgttcaagaactggagagcaactacgcggcaatagtacaaggaaaatcgatttcaccgaaagaggcagatgtttcgtttcgccaatacttagactggcagcaggcacagatcgacagcggccagtatgaagaaggggtccgttattggcggcgtcatttctctgaaccgatacagcagccaattctgccaagcacagattctgtccgttatccgaacgggtatgagggagaccggtgtaccgtcaggcttggacggccattgagcgaggctttaaggtcattaagcattcagatgaaaaatagcgtatttgtgacgatgctgggcgcatttcatctttttctgcaccggcttaccaaacagtcaggccttgtgatcgggatccccgctgcaggtcaatcgcatatgaaacagcatgatctgattggaaattgcgtcaatatgattccggtgaagaacacgtcttcttcagaaagcactttatccggttatcttggcagcatgaaagaaagcgtgaatcttgcaatgcggcaccaagccgtcccgatgacactggtggccagagagcttccgcacgatcaagtgccggatatgcgtattatctttaatttagacagaccttttcgaaagctgcatttcggaaaggcggaggcggagcccgtagcatacccggtaaaatgcaccctgtacgatttatttcttaacataacagacgcgcatcaagaatatgttcttgatttcgactttaatacgaacgtcatcagtccggaaatcatgaaaaagtggggagcgggttttacaaaattgctgcaaaaaatggttgagggagattcaatccctcttgacgccatgatgatgttttccgatgaagaacagcatgatttacaagcactttacgccgaacaccagaagcggatcgcttcaataagaagcaatacggcaaattttactgaagcctacgaggcgccggtaaatgaaacggagcggcagctggcgcggatttgggaggaacttttcggccttgaacgggtcggcagatcagaccgcttcctggctctgggaggaaactcactccaggcgacgcttatgctttccaaagttcagaagacatttcatcaaaaggtttccatcggacaatttttcaatcaccagactgttaaggaattagcacatttcattcagaacgaaacgaaagtcgtgcacctcccgatgaaggctgccgagaaaaaagcgtattacccgacatcgccggcgcagcaaagagtatatttcctgcaccaactggaaccggatcagctggcgcaaaatatgttcggccacatatcaataacagggaagtacgatgagcaagccctgatctcatctcttcaacaagtgatgcagcggcacgaagcgtttcgcacgtatttcgacattatagatggcgatatcgttcagaaacttgaaaacgaagttgattttaacgttcatgtccggacaatgagccgggatgaatttgatgcctattcagaccggtttgtaaaaccgttccgcctggaccaagctccgttagttcgtgcggagctgatcaagattgaaaacgagcaggccgaactgctcatcgatatgcatcatatcatttcggacggttattccgtcaacatccttacaaatgaattgctggctttatatcatcagaaaccattaccggacattgaatttgaatataaagatttcgcagaatggcaaaaccaacggatgaatgacgatgccatgaagcggcaggagacatattggctggaacaatttcaagacgaaattcccatcctcgacctgccgacagacggttcaatagcggcagaacggtcttctgagggacagcgtgtgacatgctccttacagccggatgtcatccgttcgcttcaagacttggcgcaaaaggcggaaaccactctctatacggtgcttctggccgcctataatgtgctgcttcataaatatacgggacaagaagacattgtcgttggcacgcctgcttcaggaagaaatcatccggatatcgaaaaaatcatcggtattttcatacaaaccattggaatccggacgaagccgcacgccaatagaacgtttacggattatctggaagaagtaaagcggcagacgcttgacgctttcgaaaaccaagactatccattcgaccggcttgtggagaaattaaatgtacagcgggaaacaaccggaaagtctctgtttaatacgatgtttgtgtttcaaaacattgaatttcatgaaatccggcacaatgaatgtacatttaaagtgaaagaacgaaatccaggggtctctttatatgatttgatgctcacgatcgaagatgccggtcaacagatagagatgcattttgattataaaccgggacgattcacaaaagacaccattgaacaaatcaccagacactataccgccattttaaacagccttgctgagcagccggagatgacattgtcttctgttcctatgctgtctgaaaccgaacggcatcaactgctgacggagtgtaatggcacaaagacgccgtatccgcataaggaaacggtatatcggtggtttgaaatgcaggcggaacagagtcccgatcatgaagccgttatttttggcaatgagcggtatacgtacagacagctcaatgaacgggcgaaccgattggcgcggacgttacggacaaaaggcgtacaagcggatcaattcgttgccatcatcagcccgcatcggatcgagctgattgtcgggattttggctgttctgaaatccggcggcgcatacgtgcccattgatcctgaatatccggaagatcggatccaatatatgctgagagattcaagagcggaggttgtgttgacacagcgcagcctgctggatcaattaccgtatgatggtgacattgtgcttttggatgaggaaaactcataccatgaggatcactcgaatcttgaatcggacagcgatgcgcatgatctggcctacatgatctatacgtcaggttccacgggaaatccaaaaggtgtactcattgagcatcaggggctggctgattatatttggtgggcgaaagaggtttatgtaagaggtgagaaaaccaacttcccattatactcttccatctctttcgatctgactgtgacctcgatatttacaccgctggttacggggaataccatcattgtctttgacggcgaagacaaaagcgctgtgctttctgagattatgcgggactcaagaatagacatgatcaaattgaccccggcacatctgcacgttatcaaggagatgaacatcgctggcggcaccgcaatacggaaaatgattgtcggcggagaaaatttaagcacccgtctggccaaaagtgtcagcgaacagtttaaaggccggctggacattttcaatgaatacggaccgacggaagctgtcgtcggatgtatgatttatcacttcgacgcagaacgggacaagcgggaatttgtaccgatcggcactccggctgccaacacggatatttatgtggccgatgcaagcagaaacctggttccgatcggggtaatcggcgaaatatatatcagcggaccgggtgttgccagagggtattggaaccgcccggatttaacggcagagaaatttgttgaaaacccgtatgtcccgggagcgaagatgtacaaatcaggggatttggctaagcgattgaaggacggaaatcttgtatatattgggcgcattgatgaacaagtcaaaatcaggggacaccgaatcgagcttggtgaaattgaagcagcaatgcataacgcggaagcggtgcaaaaagccgcggttacagtgaaagaagaagaagacggcttaaaacaattatgcgcgtattacgtaagcgacaagcctatagcggctgcgcagcttaggaaacaattgtcctcggagcttccggactacatggttccgacctattttgtccatctggagcatatgccgttaacatccaacgggaaaataaaccgtaaggcactgcctgcaccggaagcgagtctgcagcagacagctgaatatgttccgccgggtaatgagacggagtccaaactgacagatttatggaaggaagtgctcggaataagccatgcggggatcaaacataatttctttgatctcggaggcaactccatccgagcggctgccttagccgccagaattcacaaagagctggatgtgaatctgtctctcaaagacatattcaagtttcctaccattgaacaattggctgacaaggcgttacacatggacaaaaatcgatatgtaccgattccggctgcaaaggaaatgccatattatccggtttcttcagctcagaggcggatgtatttgttaagtcacacagaaggcggcgagctgacttacaatatgacgggtgccatgaatgtggaagggacgatcgatcccgaacggttaaacgccgctttccgaaaattaatcgcgcgtcatgaagcgttgcgtaccagctttgatttatatgaaggcgagccggcacagcgtattcatcagaacgtcgactttacgatagaacgaattcaagctagcaaagaagaggcggaagaccgtgtgcttgatttcatcaaagcgtttgacttagccaaaccgccgctgatgcgggccggactgattgaaattgaacctgcgcggcacgtgcttgtggttgatatgcatcatatcatttctgacggcgtgtcggtcaatattctgatgaaagatttaagccgaatctacgaggggaacgaaccggacccgctctctattcaatataaagactttgcagtttggcagcaatcggacattcagaaacggaacatcaagaaccaggaagcgtattggctggatcagtttcacggtgatattcctgtactggatattcctgcggattatgagagacctgccatacgcgattacgaaggcgaatcatttgaatttcttatacccgaacacttgaaacagcgtttaagccaaatggaagaagacacaggagcaacactgtatatgattttattggcagcctatacgattcttttatccaagtacagcggacaagaagatattatcgtaggaacgccatctgccgggcggactcatttagatgtagagccggtcgtgggaatgttcgtcaatacgttagtcattcgcaatcacccggcgggccgtaaaacatttgatgcctacttaaatgaagtaaaagaaaacatgttgaacgcttataaaaatcaagactatccattggaagaattaattcagcatctgcatcttccaaaagattcaagccgtaatcctttattcgatacgatgtttgtgctgcaaaatcttgatcatgctgaattgactttcgattcccttcaactcaagccgtatccatttcatcatccggttgccaaattcgatttgaccttgtcgattcaggcggaccgcgacaactatcacggactgtttgaatattcgaaaaaactgtttaagaaaagcagaatcgaggttttatcaaacgactacttacacatcctatcggcgattttggaacagccaagcattctaatcgaacatatcggattgagcggcagcaatgaggaagaagagaacgcgcttgattctattcaattgaacttttagggaaaagcattatttctttaaaatatataaaatgaggtgctccaatgtcggtatttaaaactcaagaaacgtactgggaaaacctgtttgatgaagaagacggcctaagcgcattcccttactttaaagcagcggataaagcgtcgttggcccgtaccggctaccaggaaaaatgcatctgccgttccttatctccggaagtatctcaaagaatcatgacaatggcgaatcattccgatatggcggcctatctgattttattggcgggtattgaatgcttgttgtataaatatacggatcgaacgagcctgattcttggcattccaacggtatcgaagcaaaaagccggccagtcagccgttaacaacattgttctcttgaaaaatacgctttcaaacgagagcacatttaaaaccgtattcgggcagctgaaagaagccgttaatgattctctgaaaaatcaaaacctgccgtttagaaaaatggtccggcatctgagcgtgcaatacaatgacgagcatatgcctttgattcataccgtcgtttcgcttaacgaaattcattccttgcaatgtaaagaagatactgcaaccgatacgctgtttcactttgatttggagaacaacgggattcatttgaagcttttttataacggcaatctgtacgatgagcgctatatcaatcaaattgtatcccatttggatcagctgctgtctgtgattctgtttcagcctcaagctgcgatccatacggcagagatcttaccggaagcggaaaaacagaagctattgtttgattttaacgacaccggcacagatttctccgggagcagaacagtctatcaattatttgaagagcaagcagaaagaacgcctgagcatacggccgtcaagtttaaaaacgaccatttgacgtacagggaactgaatgagaaggcgagccgtttggcaagaacattgcgtaatagcggagttcaacccgatacgttagtcgccattctcgctgatcgttctttagagatgatcgtatccattatagctgtttggaaggcagggggcgcttatgtgcccctggatcctgaatatccaaaagagcggcttcaatatttgcttcatgatgcggatgcagacgttctccttgttcagcatcatttaaaaaacagtctcgcctttgacggcccggtgatcgatttgaatgatgaaacatcataccatgccgattgctcattgttatcaccagtagcgggacacagccatttagcctatgtcatttatacgtcgggtacaacaggaaagccgaaaggagtcatggttgaacacagcggcattgtgaattcgctccaatggaagaaggcgtttttcaagcattccccggcggatcgcgtgcttgtcttgtacccgtatgtttttgatgcgttcattttaaacttcttcggcccgctcatctcaggagcaactttgcaccttttgcctaatgaagagaataaagaaactttcgccattcaaaatgccataaaacaagaaagaattacccatttctcaacttctccccgtcttctgaaaacgatgatcgaacagatgaacagagaggacttcatccatgttcagcatgttgttgtaggcggtgagcagctggaaacagatacagttgagaagctgcattctctgcagcctcgcattcggatcaataatgaatacggaccgacagaaaacagcgtggtatctacatttcaccctgttcagtccgctgatgaacagatcacaatcggcagcccggtggccaaccatcaagcttatattttaggagcgcaccatcaaatccagccgatcggcgtaccgggagagctgtatgtcggaggagcgggagtggcccgcggctacctcaatcggcctgaattgacggaggaaaaatttgtggagcatctgcatgtccctggccaaaagatgtataagacaggggatctcgccagatggctgccagatggacggattgaatatttagggcgggttgatcatcaagtgaaaattcgcggctaccggattgagatcggcgaggtagaggcagccatgttcaatctggaaaacgttcgtgaagccgcagtcgtcgcgcgggaagacgcagacggggccaaacaattgtatgcctattatgtcggcgagccttctttgaccgctgcgcagttcagagaagacttatcccgggaactgccgaattatatgattccctcccgctttatccctttggaacgcattccgctcacttccaatgggaagattgatctgaaagctttgcctgctgctgacgaaaatacgcgggcggaatacgaatacatagccccgcggaacacaatagaagaactgctggcgtccatctggcaagaagtattaggagcagaacgtataggaattctggataatttctttgattttggcggagattcgattaaatcaattcaggtgtcatccagattgtatcaagccggatacaaggttgatatgaagcatttgtttaaacacccctcgattgctgaacttagtcagtttgtagcgccggtcagcagggtggctgatcaaggagaagtgaatggcggaaccaagctgaccccgatacagcattggttttttgagcaaaaaatgccgcatgcacaccattacaatcaggccgtcatgttatattcggcggaaggctttaaagaggctccgcttcgccggacgatggaacggatcgcgtcgcatcacgatgccttgaggatgatttttgaaaaaacgccggatggatacgctccgcgaattacaggaacagatgaaagtgaactataccatctggaagtgatgaattataaaggggaaaccgatccggctcaagcgattgccgataaagcgaatgggattcaaagcagcatggtattagacaaagggccattgatgaagctcggtttgttccaatgtccggacggagatcatttgctgattgcaattcatcatttgctgattgacggagtatcctggcgtattttactcgaagattttgcaagcggatatgagcaggcagaacgcggacaaacgatccagctcccgcaaaaaacagactcgtttccattctgggccgatcaattgtccaaatatgcggcggaaaccgatatggaagaggagattgcgtattggactgagctttcaagtataaagcctcagccattgcctaaggacactatcagcgaaggatcgttattaagagacagcgaagaagtgacgattcaatggacaaaagaggaaacggagcaattattaaaacatgcgaaccgagcctacaacacggatatcaacgatctgctgctgacttcgttagggctggctgttcacaagtggacaggcacggaagacattgtcgtgaatttggaaggccacgggagagaaccgattattccggatgctgacatttcccgcacgataggatggttcacaagccagtaccctgtcgtcctgaggatggaagccggaaaaaacctttcgcagcggatcaagatcgtaaaagaagggctgcgccgcatccctgacaaaggaatgaattacagcatcatcaaatatatatccgggcatccggaagccgacagcctgcagctgaatccggagatatcgtttaactatttgggacaatttgaccaagacctgaagcaccaggctttacgcatctcgcctttttccacagggttatcaatgaacgaaaaccaagagagaacggccgtgcttgatttgaacggcatgattgccgaagggacattatcactgacactgagctacagcagcaaacaatacgaaagatctactatggcgcaatttgcccgggggttgaaagaaagtctgcaagaagtcattgcgcattgcgtaagccggcagcagacttctctcacaccaagtgacatcctgttaaaagatatctcaatcgacgaactggaacagcttttggagcagacgcgtgaattaggcgaagcggaaaatatttatccattaacgccgatgcagaagggcatgctgtttcacagcttatttgatccgaattcaggtgcttattttcagcaaacgatgtttgatctgcatggagacctggagattgattcattttcaaaaagcttggacggcttatcgcaaaaatatgacattttccgcacgaacttttacagaggctggaaggatcagccgctccaaatcatattcaaaacgaaaaaaatcggttttcaattcaatgacatacgagagatgaaggactcacaaaaagaagcgatgattcaggaatatgccagagaagataagatgcgggggttcgacttagaaaaaggcgcgttaatgcggttattcatccttcgtacggatgaaaagacataccgttttatctggagtttccaccatattttgatggacggctggtgcctgccgctgattacaaaagaaatattcgagaattactttgccttgcttcagcaaaagcagcctgaacaatcatcaattactccgtacagtcaatatattgaatggctcggccggcaagatgcgaaagaggccacggcttattgggatcagtacttggagggatatgaggagcaaaccagccttcctaaggatcaccatgcagcggaagacggacgatacgttcctgaaaaagtgacgtgtgacataagctccgatctcacttcgaaaatgaagcggacggcaggcaagcatcatgtcacgctgaacacgctgctgcagacggcatgggcggttttgctgcagaaatataaccgtagccgggacgttgtgtttggaagtgttgtatccggaagacctgctggaattccaaacgtggaaaccatgatcggcttattcattaacaccattcccgtccggttccgatgtgaagccgggacaacgtttgctgagcttatgaaagaggcgcaggaaagggctgtagcgtctcaacaatttgagacacacccgctgtacgatattcaagcgcgtacaacgcaaaagcaagatttaattacacatttaatgatattcgaaaattatccggttgatcagtatatggaaagtataggccgccagaacggaacatccatcaaaatttccaacgtacaaatggaagaacagaccaactacgattttaatttgaccgttataccgggcgacgagatgaacatctcttttgaatacaatgcaaatgtgtatgatcgggcaagcatagagcgggttcgggaacatttcatgcaaatcctgcatcaagtcgtgacaaatgcggatatccgggtggatcaagcggaattgttaacggaaggcgaaagaagaacccttctgcagacgctgaacgacacggccgcgccgttcccgcagacgccggttcatcaattatttgaagagcaatcgcagcgtacgcccgatcaagcagcaatcattgataaggacaggcagctcacgtacggagagctcaataagcgggccaaccgactggcgcgaacgttaagggcgaaaggagtgcagacggatcagcctgtagccatcatcacaagaaacagcatcgaatcggtggtcggaatccttgccgttttaaaatcaggcggagcctatgtccctatagatccggaatatccgcaagaccgcatccggtatatgctggatgactcccaagccggaatcgttttaatgcagcgggatgtcaggaaacagcttgcctatgaaggcgccacggttttacttgatgatgaaagttcttatcaccaagatgactctgaccttgctccgagaaatgatgcgagccatttggcatatgtcatttatacgtcaggttccacaggccggccaaaaggcgtactaatcgagcaccgaggcttgtccaattatatttggtgggcgaaagaggtttatgtaaaaggcgagaaagccaacttcccattgtattcgtccatttcttttgatctgacggtgacttctattttcacgccgcttgtcacaggcaatgcaatcatcgtctatgacggagaggataaaacagctctgcttgaatcgattgtgcgtgacccgagggtggatatcattaaattgaccccggcccatttgcaggtcttgaaagaaatgaacattgccgatcaaacggctgtcagaagaatgattgtgggaggggaaaacttaagcacccggttagccggcagcattcatgaacagttcgaaggccggattgaaatatgcaatgagtacggaccgacggaaaccgttgtcggctgcatgatttaccgttacgatgccgcaaaggacagacgggaatcggtaccgatcggaaccgctgcggcaaacacgagcatttacgttcttgatgagaatatgaaacccgcgccgatcggagtgccgggagagatctatatcagcggcgccggtgtggcaagaggatatttgaaccgtcccgaattaacggcagagaaatttgtcgatgacccgtttgaacccggagcgaagatgtataagaccggagatttggcgaagtggctggcggacggaaacattgaatatgcgggcagaatagatgaacaagtgaaaatcagaggctatcgtatcgaattaggcgagatcgaggcggcactgcttcaagaagaagcgatcaaggaagctgtcgttacagccagagaggacgtccacgggtttaaacaattgtgtgcatattacgtgagcggcgggcaaacaacggcagcccggctcaggaaacaattgtctcaaacccttgcaagttatatggttccggcttattttattgagcttgatgaaatgcctttaacttctaacggaaaaataaacagaaaagggctgccggctccggatttcgaactgcaggacagagcagagtataaagctccccgaacaaaagctgaagaaatattagtttctgcctgggaatcggtattaggcgctgaaaacgtcagtattcttgataatttctttgaccttggcggagattccattaaatccattcaagtatcctccagattaaatcagcaaggatacaaaatggaaatcaaagacttgtttcaatatgcaacaattgctgaattgagtccgcatatcaagcagaatctgcgtatagccgatcaaggtgaggtcaaaggaaaagtcagcctgactcctattcagcattggtttttcgaacaaacaacaacagatcagcattattataatcaagccgtcatgctgcatgcgccggaaggttttcaggaaacgcagcttcgtcaaaccctgcaaaagcttgctgaacatcacgatgcgctccgcatgacgttccggactacggaaaatggctgtgaggcacagaatgaagaaatcgcccaaagcggactgtaccgcttagaagtcctgaatctgaaagaagattccgatccggggcgtacaattgaagccaaggctgatgagatacaaagcagtatgcgtttaagtgatgggccgttaatgaaagccgggttgtttcaatgcgcaaatggagatcatctgctcattgccatccatcatttgattatagacgggatttcatggcgcattttactggaagatatcgttagcggctacaagcaggccgagaacgggcgagtgattcaactgccgcaaaaaacagactctttccaattatgggctaagagactgtcagaatacgcgcaaagtgaaaccataaaacaagaacaggaatattggacaaagatcgaacaaaccgaagtcaaaccgctgcctaaagattttcatgaaacccatacaactgcaaaagacagtgaaacagcagctgtggaatggacgaaagaggaaacggatctgctattaaaacaagcgaatcgcgcttataacacggaaataaacgatttgcttttaacttctctgggtctttccatatcgcattggtcaggactggaacaaattccgattcatttagagggacacggcagagaacagattatacaagatatagatatctcccgcacggtcgggtggtttacaagtctgtatccggttgtgctgcacgcgcagccgggcaaagaaatctctgattatatcaagacgaccaaagaaggattgcgtcaaattccgcataaagggatcggatatggaatagcaaggtacttaagcggcggaatgccatcgaaactcaatcctgagatcagctttaactaccttggacagtttgaccaagatttacagcagcatggggttcaattatcttcttattcttgcggttcagactcaagcgaaaatcaagaaagaccgtatgtattgaatataaacggaatgatcacagagggccggctgaagcttacgatcagctacagcagcaaacagtacgcaaaagaaacgatcatgcggttatcggaaacgattcaaagccgcctgcggaccatcattacgcattgcgttcataaagaacaatcggaactgacgccaagcgatattttgttaaaaggcatgtccattgacgaattggatcagctcctcattcaactgccgcatgcaggtgaggttgaaaacgtgtatccgctcactccgatgcagaaaggaatgctcttccacagcctgctggacgaggcctcaagttcttattttgaacaagcatcgtttgatttgcagggagagttaaagattgattggtttaaagcaagccttgaacgattatttgaaacatacgccgtgctcagaacccgtttttacagcggctggaacgatactcctttacaaattgtctataaaacgcaaacaccgcaaattcattttacagatttgcgtgatagagaggggcacctatgcgaggatgcaattgcagcctatcaaagagaagataaggcaaaaggatttgacttggctcgggatccgttgatgcgcatagcgattttccggatggaagaccgcaaatatcatttgatttggagcttccatcatattgtgatggatggctggtgcctgtctcttatcacgaaggaagtgtttgatcattatcgcgccttacaggaaggcagggaaccagaaccgccatcggcagctccttacagcgactatatcgagtggcttgaccgccaagatcaggaagcggcaaagcggtactggagcgggtatcttgaaggatataaaggtgaaaccacgcttcttcataaaatagcgcagcatgaacaaaaagaatacgcctatgccaatgtgatctgccgatttgatcacgaacagacaaaacaattacagcagatcgcaaatcagcatcaggttacattaaatacgttgatccaaacgttatggggagtattattacagaaatacagcgggtccgcagacgttgtcttcggcagtgtcgtgtcgggaaggccggcggaaattcctgatgtggaacagatgatcggcctgttcatcaatacgattccggttcgcatccgctgcgatgaggacagcacttttgctgatacgatgcaaatggttcaacaaaacgcgctggcttcccaatcgtacgatacctatcctttatacgaaattcaggcccaaacggaacaaaagcaaaacttaattgatcatatcatgatctttgaaaattatccgatagggcagcaggtcgaagagacgggacatcatggtacgaagctgaacattacgaattttcatatgcaggaacactcccactatgatttgaatgtggttgttattcctggcgaacagctggccgttcatttcggttttaatgaaaatgaatatgaaaaatcagaagtggaacggctctgcggacattttgaacagctcatgcagcaagtattacagcagccgtctgtcaaaatagaagaattggagcttctctctcaacaagaaaaagaacatctgctcagccgctttcagtctaatgacatgccatacccgcgtgaaaaaacgattcatgagttgttcgaggaacaggcgcaacgtactccggacaatacagcggttgtattcgaggataaacaactcacctacggagaactgaatcggcgtgccaatcagcttgcgcgaaccttgcaggcaaaaggtgtgcggaacgatcagcttgtcggtattatgactgaacgctcgcttgagatgattgtaggcatcttgggagttttaaaagcgggcggcgcatatttgccgatagatcctgattctccgtctgaacgcatccgttatattttgagtgattcaagtctcagcgtattgctttaccgcgggaagctgcaggatgacatcggcttctcaggaacatgtatcgaactcatggaggaacatttctatcacgaaaaagacagcagtcttgcactctcttatcagtccagtcaactggcctatgccatttatacttctggtacgacaggcaagcctaaaggcacgttaattgaacatcgccaggtcattcacctgattgaaggacttcgacgccaaatttactctgcctatgaggcggagctgaatgtagccatgctcgctccatattatttcgatgcttctgttcagcaaatgtatgcttccttgctgtcaggacataccttgtttattgtgccgaaagagattgtgtcagacggtgctgccttatgccgttactaccggcagcattcgattgacatcaccgacggaacacctgcccacttaaagcttttgatagctgcaggtgatttgcagggagtcacgcttcggcatcttttaatcggaggagaggctctttccaaaacgacggtaaataagctcatgcaattattcggcgatcatggcgctgcgcctgggattaccaatgtatatgggcctacggagacttgcgtagacgcgtctctgttcaacattgaatgttcttccgatgcgtgggcacgcagccaaaactatgtccctataggcaagccgttaggcagaaaccgcatgtacattcttgattcaaaaaaacggctgcagccggcgggcgtccaaggcgagctgtatattgcaggggacggtgtcgggcggggttacttgaacctgccggaactgacggacgaaaaatttgttgccgatccgtttgtaccggaggaccgaatgtacagaaccggtgatctggcccgccttctgccggatggaaatattgaatatatcggccggattgatcatcaggtgaaaattcaaggttttcggattgaactcggtgaaatcgaatcagtgatactgaacgttcctgatattcaagaagccgccgcagctgcccttaaagatgcagatgatgaatattacttgtgcggatactttgctgcggataagacaatacagatcagtgaacttcgcgaaagaatggcccggcatttaccgggatatatgatcccggctcattttgttcagctggataagatgccgctgacgccaaacgggaagttgaatcgccagttattgccggctccggtcaaaaagcgtgacagcggcaaagagtacgtcccgccgcaaacttcggcagaaatccagctgacagcaatttgggaggatgtcctcggattagagcaggtggggatcagagatcacttttttgagatcggcggacactccctgcgggcaacggcgctgattgcaaaaatacaaaagcaattgcatgtccaaattcctttgcgggacgtcttccgtttcccaaccattgaacagctcgcacagacgatcacgaagacggagctgaccggatatgctgcgattcctgcaattgaaaaaagaccttattatccggtatcctcagcacaaaaacggttgtacatcctgaatcacttggaaggcggagaactcagttacaacatgctgggactgatggctgtcgaaggcaagcttgaccgtgacaaactgcagcaagccttccgcacgctgattttgcgccatgaatctttgcgcaccggttttaaaatggctgacggagaacccgttcagtatgtcttggatcatgcagcgtttgaaacagagtggtaccaaggggaagaagatggtgctgacctttatatccgccaatttattcgtccttttcacctggatgaaccgccgctgctacgcgtggggctgattgaacttcaacctgaccgcggaattctgatgtttgatatgcaccacattatttctgacggaacgtccatgagcgtattgatcaaagaatttatccgcatttatgaaggagagacattaccgcccctgcgcatccagtacaaggactacgcggtatggcagaccggcgaagcaagattacagcagattcaaaaacaagaagcctattggttagagctgtacagcggcgacgttcctgtccttcatctgccgaccgattatatccggccgtcggcacgggattttgcgggagccacaatgcagtttacgcttgataagcaaaaaagcgatgggttaaagcagctggcatcccaaactgaatcgactttatatatggtgctccttgcgtcttatacattattgctttcaaaatacagttgccaggaagacattattgtcggcagtcctatagcgggaagaccgcacgccgatttggaaccgattatcggaatgtttgtcaatacattggccatgagaaattaccctgaaaaagggaagacgttctctcagtatctgtccgaggtgaaggagaatgcattaaaagcttatgaacatcaagattatccgttcgaagcgctgatcgatcaactgaatatcgccagagacttgagccgtaatccgttgtttgacaccatgtttgtgcttcaaaacacggagcaggaacaattagagataaatgacgtcactttcaaaccatatccaaacggacatacgatggcgaaatttgatctaactttaactgctgtggaagaagaggcgggtattcagttcacgatggaatacttgacggccctgtttaaaccggaaacgatcgaacgtatgatggggcattttgtgaagctgattgattcgattattaaacagcctgatgccgagctggctcgtctgaatatgatgacccaggaagaggaaagagacattcatcagctctttaacgatactgcagcaggaacacgtattccgactacggttcatcagctttttgagcagcaggctgtgcttaacccggaccatgaagccatcatgtttggaaatcagacgctgacttatcgtcagctgaatgagcgttctaatcagctggcgcgcgtccttcaagataaaggtgttggcactgatcaggtggttgccgttctcacggatcgctcagcaaatatgatcatcggcattttagccatattaaaggccggcgcagcatttctccctatcgatccggagcttcccgaaaaacggcgggcttttatgctgaacgacagcggtgccgacgtgcttttgacttgtgcaggtcacgctattccgccgctctttgaaggagaagtgcttctgcttgatgatccgatgatatatcaaggcagagcagacaatcttaatctttcctgctcggaaaatgatttaatgtatgttatttacacgtcaggcacaacggggcagccgaaaggcgttcagctggagcacaagaccatgacgaatctgctcgcttatgagcaggatcatacgcagctgcagtttgacagagtgctgcaatttgccgcaatgagctttgatgtctgctatcaagaaatgttctccgcgctttcaagcggaggaacactctttatcatcggcaatgaggcaaaacgtgacatacgtcagctcaatgattttgtcagaacgcacgggatacaaacagcatttcttccgacagcgttccttaagcttcttgcctcggagaaacactatttcgaaccatttgccgagtgcgtagatcacatcatcgctgcgggagaacagctcatcgtaacaagtatgctacgtgacatgctggcgcgccatcaagtcacattgcataatcattacggtccgtcggagacgcatgtcgtgaccatgtataccgttgatccgaatacagatcaggagcttcagccgatcggcaaaccgatttcaaatacggagatgttcattttgaatgaagccggaacgcttcagcctgtcggaatcgtcggtgaactttgtatttcaggagtgagcctggccagaggctatcataacagggagtctttgacgctcgaaacttttgttccgcacccatatgactcgaatcagcggatgtataaaacaggcgatctggcccgttaccttcctgacggaaacattgaatatgcgggaaggagggaccatcaggtcaaaatccgcggttaccgggttgaactcggtgaggtggaggccgctcttctcaagcacgtacaggaagcagttgtcctagcaaaagaaaataccgatggccaaagtgatttatatgcctattttacagcggagcaatcactctcgatcagtcagctgaaagaaaaacttgctggtcaaataccgggatacatgatcccttcatacttcatccagctggagaaactgccgctaaccggcaatggaaaagtaaatcgaagagcattaccgatgcctgaagcaggtttgcaaacgggaaccgactacgttgctccgcggactaatatagaagagcagctgatatgcatctggcaagacgttttaaaggtaaaagaaataggtgtaaaagataactttttcgatttgggcggccactcgttgcgggggatgacgctcatcgccaaaattcataagcaattcagcaaaaacatttcattaagagaagtctttcaatgtccgacagttgaggaaatggcaaaggtaattgcaggagctgaaaccaacgggccggattacattccgaaagccaaagcaaaagatgtctatcctgtatcttccgtgcagaagatggtttacctgtcaacacaaatagaaggcggagaacttagctacaatatgccgggaatccttacattagaaggaaaactcgacatgaatcgcctgcaaaccgctttccaaaaactgatccagcgtcatgaatcgctgcgtaccggttttgaaatggtcggcggagaaccagtgcaggtgatcaaaccgcaagtggagttttcgatggaaagatacaaggcaacagctgacgaggttgaggaatgtttccgcaccttcgtgcggccgttcgatctcagccaggcgccattacttagggctggactcatcaagttagaacaagacctgaatatttttatgtttgacatgcaccacatcatcacggacggcgcctccatgaatatttttgtcgaagaactgattcaaatgtatgacgaaaaagagttagctccgctccgtattcagtacaaagactttacggaatggaaacatcaaaaagagcaaagagaacgaatcaagaagcaggaagagtattggcttggtgtatttcatgaagagctcccgtcattcgagcttccgaaagattttgcgagaccgccggttagaagctttgatgggaaaaggcacaaatttacgctcgataagactgtcacccaagggataaagcagctggaagaattgactggaacgaccgcttacatgattttgttctcggcctattccatactgctggcaaaatacagcggtcaggatgatatcgtcgtcggcacccctattgcggggagaccgcatgcggatttggaacccattatcggaatgtttgtcaatacattagccatccgcaccgctccgatggcagaaaggacatttttggattatataacggaaacgaaagaaaccatgctgaaggcttttgaacatcaagagtatccttttgaagaattagttgaaaaactgggtgtgaaacgggacttaagccgcaatccattgtttgatacgatgtttgtcctgcaaaataccgaacaaacggatattgaagtggactctctctccgtcaggccttatgaacaaacggagacggcagccaagtttgatttacagctgaacttcttaatagatcaagatgagattcagggcagttttgattactgtacaaaactatttaaaaagaaaaccattgctgtattggccaaggattacgtcatgatcctttcggcgattatgagaaacccatccattcctttaaaagacattcaattaagcgaaaaagtaaacaaaagtaaacatctcgcaagcacaatcaaattggatttctaatcacaggggcagcggctgtcccggcatgaatgccgcggctgccgccagctgcctgaaaacaggaatgaaaccaactggagggatatgaatgtcagaattcaaacaacaggagttgttctggggccgaatgtttcacacggaagaccgtcccagtgcattcccttcgtttcaagtgtccgactcaacagtaaagcgtgatataacaagcggatctgactgtattcacagttcattgagtgcggatgtatcacagcgcatcctgacgatgacgaaccaaacgccaatggccgtctatctggttctcctgatcggaattgaatcccttttatacaaatacacaggggatgagggcgtgattacaggggttccaacctttaaagacgaaactgatgaagatcttcattcagaccagctcatgttaatcaaacagcatatcaattccggcagtacgtttaaatcaattttccatgaattgaaaaatacgctggacgaagcgatcttatatcaggaggttccctttgataaaatggccggacagctgaggctgaactacaatgcaaatcatttgccgatcatccatacagtcgtttcactagagcaaattcattctgatggtttcatagaaacggctgctgcagatgctttatttcagtttgctatgggtgaaaacttgattgacctaaagttatgttttaatgaacaagtctatgaccgtcagtatatgatgcaggtgctcggacatttaaaccggatattttctgtcatattatttcagcctgacctccccctcggccaagtgaatattttgccagaatcggagacacatacacttctcgttgacaatcaaactgcgaaaactgaatatccgcgggataagacggtttatcagttattcgaagaacagatgaaacgaacaccggatcaagcagccgttatttgcggagaaaagcaattcacatatcgccagctcaatgaacgtgccaatcaattagcccgaacgttaaggaaaaagggggtaaagacggaccggctcactgcgattatttgcgaacatgagatcgaattggtcgtgggaatactggccgttttaaaagcgggaggggcctatgtgccaattgatccggattacccgaagcatcgcatacagtatatagcagaagactcccaagctgatatcatcctgacgcagagccatcttcaaaaacagttggaacttgcgggcacaatggttttcctcgatcaagaaagctcttaccacgaagacggctcagacctggaaccgatcagcagtacgaaggatttggcttatgtcatttatacgtcaggctccacaggcaagcctaaaggagtggcaattgagcaccaaggcttaaccaattatatttggtgggcccgccgggtctatgtcaaaggggaaaaaaccaactttcccctatattcgtccatcgcttttgatctgacgataacgtctgttttcactccgattgttacaggaaattccattattgtctacggaggagaaaacagtgctgccttgcttgattgcattattcaggattcaaggacggatattatcaagctgaccccggcgcacttgcagttattgaaagagatgaatatccctgctgagtgcaccattcggaaattcattgtcggcggtgacaatttaagcacgcggctcgcccgaagcatcagcgggaaattcggcggaaaaatcgaaatttttaacgaatacgggcctacagagacagtcgtcggctgtatgatttattcctttgatccgcaaaacgacagacgggaatcagtgccgatcggaaccactgcggacaacatgaacattttcgtgctggataagagcatgaagccggtgccggccggcgtcccgggagaaatctatatcagcggggacggcatcgccagaggatacttgaacagagcggaattaacagcggaaagatttttgcagcacccctttgtgccagaggtgaaaatgtaccggacgggagatttagcaaggcgactcccggacggaaatatcgaatatttaggccggatcgaccaccaggtgaaaatccgcggttaccgcattgaaatcggggaagtcgaatccgcatttttccaaataccgccgattcaagaagctctcgttatggcacaagaaaccaacggggaaacatccttgtgcgcctattataccgcacagcattctttaaccgcaggcgaaattcaggagcacctgtcccggcagcttccgtcctatatgatccctgcatattttgtacagctggcagcgatgccgcttacttccaacggaaaaatagatcgtcaggctctgcctgctccaacgggaaatctcactggcaatccttatacagctccgcggacagaactggaaaaaatactggccggggtgtgggaatcggtattaggcgcagaccaggtcggaatcgatgatcatttctttgagctgggaggagattcgattaagtcgattcaggtgacatcaagcttatatcaagccgggtataagcttgacatcaaacacttgttcaaacacccgacgatctccgggcttgctccttttattgagcccgttacccgaatcgcagaacaaggggaaatcaaaggccgtaccttattgacgccgattcagcattggtttttcgcccggcaataccctgatccgcaccattataatcaatctgtcacgctttattttaaagaggggttggacgaatcgaagcttcagaaagtcatgaagaagatggccgagcatcacgatgctttgcgcatggtctatgttcaaggagatcatgaatacgaagccagaacccgcgggatcagtgaagaagaattattcagcctcgacgtgttctctttactcgaagaaaacaacccagccgaaacaattgaaacgatagccaatgacattcagcaatccatccatctagccgatggtccgctcatgagactgggattgtttcaatgtcaagatggcgatcatttgctgattgcgattcatcatctggttgtagatggcgtatcgtggaggattttacttgaggatataacgtcagcttatgagcagctccaaaacggagaagcgatcacgctccctaagaagacggattcctatctgttatgggctgaacgattgaaacgttatgcagaaagtccggaatttgaagcggaaaatcaatattggcttgagcagaaacatatctcgcaacacaaattgccaaaggacaatgagcaggagaccggtctggccgaagaccgggaaacgatcatcgtccaatggacagaggaagaaaccgagcgtttattaaaaaaatcgaaccgggcctatacgactgacattaatgatttattgctgaccggactcggaatggctgttcatcgctggacggagcatgaagaaattcatgttcatctggaaggacacggcagggaatctatttttcaagacgttgatatttcacgtacggtgggctggttcacaacccaatacccggtttctcttcaaatccaggcggaccgggacatctcccagcggattaggacggtgaaagaacagctgcgtcagattccccaaaaaggaataggatatggcctgatgaaatatttgtccaatcacccgaaggcatcagaatggaccggacatccggaaatcagcttcaattacctaggacaatttgatcaagatttcgaaaatggaggaatcgaggtatctccttactccggagggaaaattgcaagcgacagacatcccattgcctatacgcttgacattaacggcatgatctcagacggccggctgtcattggccatcagttacagcggtaaacaatatcgaagagaaacaatggaaacatgcgcagctctcttaaagaacagcctaaaagaagtcatcgaacattgcgcagctcaagaagacattcacctgacgccaagcgatatctcgctgaaggacataacaatcgaggaattagatcaatttgttcagcaaacacagcatatcggcgacattgaaaatatatatcctttaactcccatgcagaaaggtatgctgttccatagtttaatcgattcggcttccagagcttactttgaacaagccgcttttgatctcaaaggcgacttggatatcgaggcatttacaatgagtttgtcgcagctggcggaaagacatgagattctccggactcatttttatacggaatggaaagatcagcctttgcagatcgtattccgaaaaaaaccgatcgaaataactgttgaagatattcgaagcatgaagaataaacaacgaaacgagttcattgccggctttatacaaaaagataaggcaagaggattcgaccttacccaagatgcgttaatgcgcgtatcaatccttcgtacagaggatgaccaagtccgattgatatggagcttccatcatattttaatggatggctggtgtctgcctcttattacgaatgaagtatttgaaacctattatgcgattcttgatagaagaaaagcggagcgggaagccgtcactccgtacagccgatatatcgaatggctggaaaaccaggatcataagcacgcttcagcctattggcagaaatatttggatggttatgaaggacaaaccgctttgctgaaaaaaaccgattcaaaccaaggcaaaggatatcaaaaacaaaggcttgcatgccggctcggaaaacagctgtcagaagaaatcagacagactgcaagcaagcatcacgtcaccgtgaatacattcattcaaagtgcgtggggactattgctgcaaagatacaacaacagtcaggatgtcgttttcgggtcggttgtatccggccgcccggcagaaattccgggtattgaatccatggtcggtttatttatcaacaccattcccgtacgtattaccgctcagcctgaaatgactgtggaacaagtgttgaaaatgagccaggagcaggcattggcttctcaggcgtatgatacatttccgttgtatgaaattcaggctcaaaccgaacaaaagcagcagctgatcagtcatatcatggtatttgaaaattatccggtcgagaaacaaatggagcatatgaaaccgaatcgtgacgcgctggacattatcaatttccatatggaagagcatacccattatgatttcaatttcattgtcatgcccgcgggagaaatcgacattcattttgtatacaatagcaacgtctatgatcatgcaagtgtcaagcggatggaagagcattttatacaaatcattaagcagatggtgaacagtcaggcgattcgcgtccaagacttggatatacttacggggggtgaacgttcgctccttatagaggcatttaatgatacggaagcagattatccaaaggaaaagacgcttcataaattgtttgaggaacaagcacagcgtacgcctgatcaaacggctgtcgtatacggggaaagccagctgacataccgggaactgaatgaaagagccaatcaacttgcccggacattgcaattagaaggcgtgcagccggatcagccggtcgggattatggccgaacgttccttggaaatgatcgtagggctcttcggaatcttaaaagccggcggcgcgtatgtgccgatcgatccgagctatccggaagaacggattcactatatattggaggattcggatacgaagctgttgttagtacagagtcacttgaggaaaagcgtgccttttacgggaaaagtgcttgacctggaagatccgcgattctcttgggaagatggttcaaacttgaaacagacggccggaccgaatcacttagcttatgttatctatacctcgggatcaacaggccgaccgaaaggggttatggtggaacaccgatccgtaatcaaccgtctcgtttggatgcaggaacattacccgctggataagcaggatgtcattctgcaaaaaaccccaatcacctttgatgtatcggtgtgggagttgttctggtggtcgatgactggttctaaagcggtattgcttccaaacggaggggaaaagaaccctgacgtcatcttagatacgattgcgcagaaaaatgtcaccgtcatgcattttgtgcctgcgatgctgcatgcttttcttgagtccatggagcagaaatccgacgaggaattaaagagaaagctggcatcattaaaatatgtatttgcaagcggcgaggctttgacgcctgcgcacgttgccgagtttcatcgcttgatcacaccggcgggtgaggctcaaatcatcaatttatacgggccgaccgaagcgacgatcgatgtatcgtattttgaatgcgaagcgggagaaacgcttaactcagttccgataggtaaaccgatttccaacattcaattgtatatcgtacacccccaatcggaatattttcaaccgctcggtgtggcaggagagctgtgtatcgccggagacgggctcgcacggggctatttgaaccgcccggagctgacggctgagaagtttgcggctcacccatttgaagcagggaagcggatgtaccggacaggcgacttgacaagatggctgcccgatggtaatatcgagtatttgggacgaatcgatcatcaagtgaaaatccgaggctaccggatagaactcggcgagatcgaagcatctttattacaactcgatgcagtcaaagaagcggtcgttatcgcgattgaagaagagggctcaaagcagctgtgcgcctacttgtcaggagacgattcattaaacacggcgcagctgaagagccatttgctgaacaaactgcccgcttatatgataccggcttactttgtccaaatggagaagatgccgataaccgcaaatggaaaaatcgatcgaaaagctttgccggctcctgagggaaataggctcaccggaatcgaatacgaagcgcccggaacattaattgaaaagcagctggccgagatatggaagaatattttagctatcagtgacccgggaattaaagataacttctttgacgttggcggccattcgctcaaagtattgcaagttattcatcaaatcaacgaccgtatgggaatcaaaatgcattatcaagccgtatacgatttccctaccattgaaacaatggcacgcgccattcaagcggcagttttcgagtccaagacggataacgtattcgtcaagatgaatcagaacggttcaatccctgtgttctgtttcccgcctttattcgggtacgggctggtctataatgaaatggcgaaaagacttgacggccgctgcaccgtctatgccgctgatttcctagaagagccgtcttacgagcaagagatcgtagaccggtatgcagaaagcatgataggcattcaggaacaagggccctttgttttacttggttactcctcggggtcgaatttggcttttgaggttgccaaagccttggagaagcgcggacgcatcgtatcggacattatgatgcttgattctaaaagagccgtatcggtgaattatatttcggaaaaggaaaccgaagagatcattcatcggaatctggatatcattccggattattatagagaattattaaccattccttccattaaggataaaatcagaagctatctcacatatcacaataaactgatcaattccggcgcggtgaacgccaacattcatcattttctatgcggcgagttgaccgatagaggatggaagcaatcaaccgcacagcattaccttgagtacaaattaaaaggagaccatgtgacgatctttgaccctcacaatattgaagaaaatacggatacaattcgatctattatcaaaaggattgaagaacggcatcatcacggacttgttcttgaagaacaactgtcaatgggatcgtttgcgggagacgcaaagtttgacaaaatgtaaatgatcaagtgtaaaacgccgctggcctggcactcagcggcgtttttattaaaaaggcgagagtcatactcctgtgttcgcaaggtttactccagagccgttctccatgaccagttgtcatcaaatggtaaaaaaatcatcatacattttaaggaaaaaggaggatgtcaagttattagaaaaaagtgtagcgtatgtttataggtactagctctattattgagttgcttaactgcggagtctgctttttactgccggtactgcaatttgttctctaatggtaaaagttccctaaatttaaagaaaaaggaggagcgttaagttatgtgtaaaaaatgttgggtatgcctatgggtccttgctttattattgagttgcttcactgggaagtctgcgtatgctgccagcactccaattgcaaaacatgttgggaattcaaatccgcttatagaccatcatttgggagcagatccgtttgcgctgacctataacggaagagtctacatctatatgtcaagcgatgactatgaatataatagcgacggaacgattaaggataattcatttgccaatttgaataaaatatccgtcatatcttcagcggatatggtgaactggacagatcacggagcgattcccgcagcgggtgccaatggggcgaatggcggccgggggattgccaaatgggcaggagcatcatgggccccgtcagccgcggtgaaaaagatcaatggtaaggataaatttttcctttatttcgcaaacggcggcggaggtatcggggttctcaccgcagacagcccgaccggcccatggacagatccgatcggaaaaccgcttgtaacgccaaatacgccaggaatgtccggtgttgtatggctttttgatcctgcagtattcgtagatgatgacggtaccggttacctatatgccggcggaggcgttccgggcggttcaaatccaacgcaggggcaatgggccaatcctaaaacagcaagagtcatgaaattaggtcctgatatgaccagtgttgccggaagtgcatcgaccattgatgcgccatttatgtttgaagactcagggatgcataagtataacgggaaatattactattcctattgtatcaatttcgggggcgcgcacccggccgataaacctccaggtgagattggctatatgaccagctcaagtcctatggattctttttcgtatagagggcactttctgaaaaatccgggagcatttttcggaggcggcgggaacaatcaccatgctgttttcaattttaaaaacgagtggtatgtggtgtatcatactcaaactgtcagctccgctctttacggggccggcaaaggataccgttctccccatattaataagcttgtgcataatccagatggctccctgcaagaggtagcggcaaattttgcaggtgtcaaacagctatccaacttgaatccatatcaccgggtagaagcggaaacgtttgcctggaacggacggattttgacagaggcatcctcagcacccggcgggccggtcaataatcaacatgtcacaaacatccataacggagactggattgctgttggaaatgcagacttcggctcaggcggcgccaggacgtttaaagcaaatgtagcgtccgctcttggcgggaaaatagaagtgcggctagacagtgcaaacggtaagcttgtcggaaccttgaatgtcccttccacaggcggaacgcaatcctggagagaaatagaaactgcgataagcggcgcaacaggtgttcacaacgtattctttgtatttacgggaactggtacaggaaacttgtttaacgttgattactggcagtttacacaaagataagcaaagatacgttttctaagtccataaaagacatatgaaagagaggaaaaaatgatgttgagcgtaaaaaaaacaatttgtgtattattggtatgtttcacaatgatgtccgtcatgctcttaggaccgggagttactgaagtttcagcagcgagtgatgcaacagttaatatatctgcagatagacaagtgattcgcggttttggaggaatgaaccacccggcttggattggagacttgactgcagcccaacgggagaccgcttttggcaatggacagaatcagttaggtttttcggtcttaagaattcatgtagatgaaaatagaaacaattggtacaaagaagtggagactgcaaagagtgcgatcaaacatggagcaatcgtttttgcttccccttggaatccgccaaacgatatggttgagactttcaatcataatggtgacacatcagctaagcggctgagatacgataagtacgccgcatacgcgcagcatcttaacgatttcgttaatttcatgaagagtaatggtgtgaatctgtatgcgatttctatgcaaaacgagcctgattacgctcacgaatggacatggtggacgccccaagaaatcctgcgtttcatgagagagaatgccggttccattaatgcccgcgtgattgcgccggaatcatttcaatacctgaaaaatatatcggaccccattttgaacgatccgcaggcgcttaggaatatggatatcctcggaacccacctgtacggcactcaggtcagtcagtttccttatcctcttttcaaacaaaaaggaggagggaaagagctatggatgacggaggtatactatccgaatagtgacaacaattcagcggatcgctggcctgaggctttaggtgtttcagagcatattcaccattcaatggtagagggagattttcaagcttatgtgtggtggtacatccgcagatcatacggccctatgaaagaagatggaatgatcagcaaacgcggatacaatatggctcatttctcaaaatttgtgcgccctggctatgtaagggttgatgcaacgaaaaatcctgaaccgaatgtttacgtgtcagcctataaaggagacaataaagtcgtgattgttgccattaataaaaataacacaggggtcaaccaaaactttgtgttgcagaatggaactgcttcgcaagtatccagatggatcacgagcagcagcagcaatcttcagcctggaacggatctcaaagtaacggacaatcatttttgggcccatcttccggctcaaagcgtgacaacatttgttgtaaagcgttaaaggcatcagcatcgcaataagccaattttcttacttgaaaaagaaaattggcttattttctgtgggatagaagtgttgatttttttaacgatacacagacattgggtataataatgacaatgacttcaaggagtgatcaatatatgtcacggcttcacagcaaagtattaatcatagacgacgaaaaagaaattttagaactgatcaaaaccgtattaataagagaaggcattgatcgcgtgatcaccgcttcgactgcccgtgacggattggctcagtttcatcaagaaaatcccgatcttgtgatattggatatcatgctgccagacggtgaaggctatgatatctgcaaacaaataagagacatttcacacgttcctattatctttttgtctgcaaagggggaggaaacggataaaattgtaggacttgccatcggcggagacgactacattacaaaacccttcagccctaaggaagttgcatatcgagtcaaagcgcagctgagacgggtctcttacttacagccttctcaaaccggaaccgtaataaaaaaaggaccatttgaattaaaccaacaacaagccgagctcaccaaaaatgaagcggctattgagttaacacctaaagaacttatgcttatgacctattttctgcagcatcccaatcgggtgatcagtaaagaaacactctatcaagctgtatggggagaagatttcttcggttctgacaacacggtgatggttcatatacgcaggctccgtgagaaaatagaaaacaccccatcaaaaccagactttctcgtcactgtgaaagggttaggctacaaatttgctgtaaaggatgcgtaaggatgaattggcgattaacaggcaggtatatggtctctgtcattatcgtgaccatcattacagtcttcattaatttatttatttttatgttttggctcgttttccaggcgaacagccaacatgacgaagaaagtacaccggaaactttcacaagatcattccgacaatatgtcacgttatcgaacaatggtatcacagtaaacaaagagggccaaaaagctttaaaagagcagaatgcatggattcaaatattagatgaaaacggacaggatgtttatcatgatagagaacctaaaggactgaagaaaaaatatacgcctattgaaattgtaaatttacataaatataaggatgaacgattattatcaaccatttacgccggcggaaaaaaagtaaacggcaaggagtacagttactttatagggtttaaaaatccctctctcggaaaatatgtcctctcatatgataccaaggaatttgtgacgaagttcaatgcagggaccatcatattattatcaatagatgcattgatcgcgttactcatcggctatctattcagccggcagctcacaaaaccgctcggccgtgtcattcaaggaatccagcggttagctaatggagattatacgatcaaaatgaaatccaaaggcatttataaagatgtcttctataatgtcaatcatttatcggaacaactatcttcaagcaaaaaagaaaaagataaattagagcaaatgcgtgaagagtggatcagtcatatttctcatgacattaaaacaccattagcatctattcaaggctatgcagaaatcatccaagatccaaattaccatctcacagtcgaacagatcagagagtacgcccagatcattgagagtaaatccctctatatgaaagatgtgatggaagatttaaatttaacgacaaggctgaaaaacaacgatgtgatgttacatacagagcgggtaaaccttgtatcgctgctgcgggaaacgttaattgatatgttaaacgattctagatatgcggataaatccattgaacttcaaacgaacctggaaaagctgatgctgaaccttgatgcgatattgattcggagagcggtcacgaatctcattttaaatgccctcgttcacaatgatcctgatgtgaagatcgttgtacagcttgaacaaaaagaacggactcatgtgacaattaaggacaacggcaaagggatagaagaagaggagctggaaaaagtgtttgatcgctattacaggggcacaaatacaggaacgacgcatgcaggctctggtcttggaatggccatagcaaaggatattatccaaaagcacggaggggacatcaccattcaaagcaccgcgggagaagggacaacgatagatatacaattatcataatggctatacaaaaaaaggttctgttgatcaataacagaacctttttttcctattgttccgaaaacactttgattcctttgacaatgttccaaatgaaaaagtagatcgccacaaggaatgtaacagcatacgtcgcaagcaggaaaggcccggcgtgcctgatgtcattcataccaagtaaacctgaagcgatgatgccaattacaaaaatcaaataaggaatcagatgcgtccataaagattttttcgcatgatatttcacatcgtcctgacctaagaaatagacgataatcggaaacagaaacggcgcaaaaaatatactgaagtaacataatgaagacaaaattttattttctctcaaaccttttcacctctatgatttattgaagggggaattcttctggctgaatccctcactgaagtacaatcttattgtacaactccaaccttaacccgtattaatccgaaccttacatcaaccttaaattaaccagtacagataagggatcgtcctcttacagcaatcataagatacaatgccatattgagactcatcacattcagcgtgtctacgttggaaataaatttaatttttcgattcgattgaaaaatgacgtgtaaagtcccgattcaatccggttttctttgttctatatgtgtcaggtgtgtcttattcaatagagatagagcaaattgacaggcttttacacctcctaaaaacaagaaattaggttgatagacaatcatgagaaagatttttacaatgagttcgagctcataagaaagagccaaaatgatgcgaaggaggaaaagatcagatatgaaacggtcaatttctatttttattacgtgtttattgattacggtattgactatgagcggcttgccggcttcaccggcatcagcagcagggacaaaaacgccagtagccaagaatggtcagcttagcataaaaggtacacaacttgtaaatcgagacggcaaagcgatacaactgaaagggatcagttcacatggattgcaatggtatggcgatttcgtcaataaagacagcttaaaatggctgagagacgattggggcatcaccgttttccgcgcggcaatgtatacggcagacggcggttatattgacaacccgtccgtgaaaaataaagtgaaagaagcagttgaaacggcaaaagaacttgggatatatgtcatcattgactggcatatcttaaatgacggcaatccaaaccaaaataaagagaaggcgaaagaatttttcaaggaaatgtcaagtctttacggaaacacgccaaacgtcatttatgaaattgcaaatgaaccaaacggtgacgtgaactggaagcgtgatattaaaccgtatgcggaagaagtgatttccgttatccgcaaaaatgaccccgacaatcccatcattgtcggaaccggtacatggagccaggatgtgaatgatgctgccgatgaccagctaaaagatgcaaacgtcatgtacgcgcttcatttttatgccggcacacacggccaatctttacgggataaagcaaactatgcactcagtaaaggagcgcctattttcgtgacggaatggggaacaagcgacgcgtctggaaatggcggtgtattccttgaccagtcgcgggaatggctgaattatctcgacagcaagaaaatcagctgggtgaactggaatctttctgataagcaggaatcatcctcagcgttaaagcctggagcatctaaaacaggcggctggccgctgtcagatttaactgcttcaggaaccttcgtaagagaaaacattcgcggcaacaaagattcaacgaaggacggccctgaaacgccagcacaagataatcccacacaggaaaaaggcgtttctgtacaatacaaagcaggggatgggagtgtgaacagcaaccaaatccgcccgcagcttcacataaaaaataacgggaatacgacggttgatttaaaagatgtcactgcccgttactggtataacgcgaaaaacaaaggccaaaactttgactgtgactacgcgcagattggatgcggcaatctgacccacaaatttgtgacgctgcataaacctaagcaaggtgcagatacctatctggaactggggtttaaaaaaggaacgctgtcaccgggagcaagcacagggaatattcagcttcgtcttcacaacgatgactggagccattatgcacaaagcggtgattattcctttttccaatcaaatacgtttaaaacaacgaaaaaaatcacattatatcatcaaggaaaactgatttggggagcagaacccaattagtaagctttaggcggacatcagcaacgatgtccgcttttatcatcttaaacagcaatacatggaggtttacgtggcggatgaaactctgaaacagtatatgggcctgtacaaatgttgttagcaatctcaagaaaggagtagatatgattcactgaatatatgatgtaatgaaaagcgtttgtagcgcattgtatgtatttcacatccgccacttttattacttaagggggaacaagagaatgaaaaggtatgacgcgtttccagagccaattggcggctatactgtcggccgaagccagatggattttgagtacacggcaccagatcatacaaaaagagaactgacggcgtttgtgtactatccgtccgacagcagcgaagggaagactacatcaacgtacatgtttcctgaagtctgcgaaatgcttgatgagcagccgcttctcactgcgttgaaggatgcttacactatagatatcaatacccaatgttacgatggccttgctctctccgggatggaaaaacgctatccggtgttattttatgtttgcggcgggggcggttctccagaatggggtacagtgatctgtacagacttggcaagcatgggatatgttgtggtaagcatcggccatcagaatagcacgatgtataagcgtaaagatgggcgcctgtttaatatatcaaaggatttttcggatattattatggcgttttctgaagatccggagatgatggcgttggctggtaagatggagatgcgtcctgacgacgaaactgccattgagatgtgccaaaacgtgcttacactgccgatacttgacaagttaacagagtatagtgaattacaggcagaagatgtaaggtatgcagccgattatcttgtcaaattggactctggagagctgaattccatctttaagggcagattgttgcttgacatcggtatgggcatagtcggacattcttatggaggggctacgacggcgattgtttgccgggacgacgaccggttcgcctgcgggattggcttggatagcggagcgttcggccttcagggcagcgaccttaagaaaccctttttgctgctgttttctgaaccgaactataacatgaatgcgatcattggcgctaacaatagcatggatacctattatttctctgttgatcgtgctgcgcatttagattactgcgacatcgtgtttaccagtgtgaatgaggaacttagaggcgaacgggatgccatggagatgcgaaatcttgttacagactatacgaagaacttttttgatcattatatactgcagaaggctgcaagtgtggaaagtctggcatacgatggcgtggacttgatcaagaagaccagcaacaagtgacataaccgattaaaatactcaaactgaaaaacctttatgaccaatttaatttattaaggacgtagaggttttttaatattgccttacaaaaaggggacgctcttagaatatgaatccacttttatattctcttcacaatttctagtttacataatatatattctaggaagttaaatctttgatgaaaattccgtctcgttatcttaagtatacttagtttgtgagacagaattaaaaaatcagatgtattacgatttataattaatcttgaacataacaccgatctttaataatcacctcgcactttacttcgtttacatcagttttgccattggataatcttgtgtacacataaacccaattttcaccgtctcttttgaagtaatcaaaatcgtaagcattcggatatttatctcttacccaaattaatcccggcagagtctccgccattgctggtgatccagatactagatactagcaatgccccaccagtgctgtagcttatgtcaattattttccattcttgaattgatagcaatcctctttgcaaatgtgcttacataaaaaaaccggcgtgttggccggtcctttcttctagacaacatgtacccttcttgattacttcgtgaggaagcattaaagcctttattaagcctcgtaatttctgctgtttgaacctacattcctaaagagtaaagaagaaagcagagctaacacaaaataaacaacaacgaatccaccccaaaagaagatagcctgatcaaatgggaagccaaacactctaaaaatgattctgtgtaccactccggcaataatgaccaggatgcttgccgataatgcaaaagcaatgtgtttcaatttaaacctctccttatgaaagattgatcactctatccgaaccattggcgatttcttgatcatgagtaacacaaataatcgttttccccatgccttttaactgatgaaataaagacaaaataatgtttttattatgctcgtctaagtttcctgtcggttcatcagccatgataatatcacaaggtttcaaaataattcttgcgatagctacacgctgctgctctccgccactcagttgataaacctttttctttaaaaagcttttatccaggccaaccatttctaaagcttctgtcaacttttctttcttaaagtcttttgcataagccgtcgaaagctgtaaatttgttaatactgtttcattgtccataagcacgtaattttgaaagatataccctaagttttctctccttagtttcatcacctctgtaggtttaggatttcgaaagcctaaaatttcaacatttcctgagtgtggagtatcaagaagacctatgatatttagcagggtagtcttccctgaaccgctcttaccaacaattgaaacaaattcattttcttttatctgaagagagaaattcgaaagaacaggtttttcatcaaacatctttgatatgttgttgagtgtaatcatattctatctccttttaagatcttatgcatgtttttcttgtttaaatagacactcaggaaataaagaataagcagctcgattacaataaacagcgcgatgaaaattgttaattcaaagattttgtaataaatactgcatcctaaacctataaggcaattggttaaaagggaaaagatgattaaatttttatttctggcccaatatgaatatccaaaaagctctttaaggtacagccgatatgcatttgcgctgtaatacgaccaaatataagcaacaagaaaggctatggacaggataactgttattgttagtccaattaaattctgcaagaattgattctgaattcttgctataccgtcgcttagttcttgataaaccgaaattgatgaatcaattagatctctcgtattggtcttctccaaataaggaactatgcggtcatacgccatgccttttgaagaatctgaaaagaataaacttgaggttgagtaagcccctataacagatggatcaacgttgtccgtgaaaatttcagctattggatcaacaatgttatttttattgccggcatccccaaactcactattaaaggtgaaatactcctgcctatttttagtataaatgatgttgattttcaattcatcttttttgagggtgtttaaaggttgattaatctccttgttatacatattatctaattcaactttgtcaaagaaaaagtgatccctgtatgcagctattattttttctttatatttttcatacttttgtggaacaagcaggttcaatgtatttgaatcaacccttaattgcttttggcttatggcttccccattagcgccgataatgggattcacctttaaataattagggctgattataatgcttcgtccagaaggagagtaaatttcatttttctttgtcgtatttaaggtgtaaaaataaacaggtttttttccatctttccttagtacagcatagttatgtgcatcaatgacgaacgcatttttatgcttctctaattgatgatacaacgctcgtactttaacatttttctccctgtctaattttaaatcactatagtctatcccggtatatgcaaagcttgttttataagtgttttgtgtctttttccagtatgattgattatcaagctgctgtttgagatcgaataagttagaaagtgaaaacgcaacaatattgaaaagcaatatcgtgataacaattttaaagcctacagataaccattggaattttttaatcggtgtgctgcctttgatcgagccactaatgtcgctgttgttatacaagacgagggtaaccatgatggtgtataccatcatgatgaccgcgccaatcaccgcgtttctaatgtaaattctaagatatgcagccaaccagtcatttaaactgaaagaaaaggctagcaaagctacaataattgcgccgcaaaatatgattataattagaggcttcaaaaacattgctgggtaagaaagcagtgttttaactttggaatacccccataacttttgcagcagaagtctttttcgatttttaattacaaaatagaggacaccaataaacaaaatcagcatagagagcaacactagcataagtaaagttttgttaaacataaaagcagtattctcagtgatgtcatcaaaacttacttcaccatagtcagcaaaaagattttgggcttttttcaataccttatcatccttagaagaaatgtaaaatttgcttcctatgcctatattctttatttgattgaaatcaaaatatctgattttccatgtcgaaagtggaaaagtaatgctgccgatcatcttctgctctgaatggcctcttagaaaatttgacacaagtttattgccgttatgtattgatggttcattttcagggcttgtagaatagatgtttaagctcttttcatccaagaaattgtattgagaaatgttcactttgttttcttttgagaaggcgaccaatctctttacaaagtcctcgcttttaaattctgaagtataattgattatcaatgcttctttatttgagaataaagtgtaatagatttgtttgttaagagtgtaatgatagcttgacatattcattgagagcaaaaccaaaatgaacaatatgtagattgttttcttcattggacagcctccataaaaagaaatccggtgctgacttgtattcaagtttgaccacaccggaagaaaaattaaaaaatcactttgctatcgttttctttattttgtattccaataagccttgtttccgaacaaagttcgatacacggaagcgtagatacccttcatcttttttcttccattcggttaccagcggaagcatgagtgatccgataatgcacagttaaaaatttcagtccgaacagccacatatgatgaacggccttcaggcttgtttcgctctgggctgaaataagaaatgtctctgccagcggaagatgacacgccccccatttcgtctgcagataaatcccttcatcacccgctccgctttttcgccgtctgcttgtcaaaacaagattctgcttacgcgcataaggttttaaaatgcccgtcatttggccgtacggcagcggaagagagatattcatgtatccttccccttttgacctgtacgctgaatacagcgcagtaaaaacggtttcctgcttttcatttgttctgatccacgcacggacattttttctgccatctttgtcagagtcaactcctataatatcactgtgcatgatataccaatccggattcatggacaggtgaatctgccccgctcttctgctgaacggctcgtacatgcgcgcgaacggacgaaaccatctgctccacgtcacttttgccatgatgtcataatcaattgtctcttcataaaaggaaataacggccggcgccaattttttagttgaaaagtcttcagaatgcagttctctcagctgatccagaaggccggtataatggatgtcatttgctgcatgaatatcagtcaaaaattctttgcctatcgttctcttcccgtaaatacggctgaacgttctttcgctgccctcatcaaacggtctcggattttccaacctccaccccgccaaagccggcaggataacgccgaatgcattgacggccccgtgaatccaaatcatctggctgatcgtgagcgttgcctcctcgcggtagacaccgtacgaatatatcaaagaaaaagcaattgtgatcattaacacagccgaagaactcctgatcaagacccttcctgttttcgtaacaaacggccccgtaaagacgagatatgcatttacatacagacccgccagatacagagcgacagcaatcacatcaagtgtctttgaaaatgtaatccccaaggcaataaggatcggcgaaatcaaaataatgaccgtgctccactggtaaagttcgcgtttctcccgtatgatcctgccgagcaatccgttaaagatcggaatgaggaaagcggaatagtgaaagtgcaccgccgtcagcagaacgataagcgggccgaaattcatgacgggaatctcaaggacatatgcgaagaaccagaatccgcccccggccaaataaatgaaacccgccataacagatatctcttctgttctgtgaatatttgttttcgtcagccgccggacagcatacagtgccagcccaagcgtataaatgagccacacaaaggcaaaaaaactgaagtctgtgacaagcgcaagcaccgcacataaagcggcaacaggataactccgtaaccacacattctttaaggtctttgacggccgaaaagcaaaatcgaatacagcgggaacgaaaaaaagtacagaaaataaaacaaacgtctcagcagctgatatatgcggagcttcagccgccgcatatcccaaaaagcaaatcacgcttaccatgagatgacgcttcagcatgtttctccctctgtttcccggaaagtcccccggtaagagaaaagcgtgccgagtatccgatttttcacatgaacctttattttgaagcaattcatttcctcatcataagcctcataaacggttgaactgccgcacagccatgccggaagcgggattttctttccgcctatcaggagccactgccttccggatgtaataacaagccctccttctgaagacgcttctaaatgcagttcagacagtaggatgtgaggtttgccgaagtaatcaagaattctgttttcccgctcatcatattccataaccgcatcaaaaaaacgcgttttgcctttaaagaaaaaggtacgattccattccacgccattttgcctatttttgttttcgatagtgaaagggatatcgtttcccctctctgagaaaaaacatctgaaaaaaacacctgtctttaaaagcattctgacaagaaaagaacctccctttatttctgacataacgccttctccgcaaaacgtgcgtgattcgtcaaatctgtaccgtttctgcagcatcgggtgcagtgattgataatgagtaatcgctttttcatacattgaatccgtcatttcacttctctctttcgttttgtatgccaggcgctcggcagcttgagcttaagaatcatgccggctatcgtaagcactcctaatgagatcacgaatccgccgccggaatataacagtgccgttacacaaaagaagactgactgcccggcgtgaatcagccactttctccgcatgggaagcagccataatacccctaaccctgtctccagcgctcccctcacgatctctgcatcggcacagccatcatgaaatccttgaaaaaaccaatacagactgaatacgagacacataaagacatagacaaacccggaacggactgatatcttcggatgtctgttttgttctatccaaagccgcaacgcatcaaagctccatgcggtagcccagcttagcagaggacgaaataaaaaccggtctatccaacttcccggcagaccgcgggccgtttcatattgatattgagtcaaaaatgcggtttgtccgttatcccgctctatatacttccagtagcccctgccttcttttataagtgacagcggatgatcagaggcaaaagcgagcgaagacactctttctgacgagcgaggccttatgtcacctattgattcgcccgtgccggataccttcagcccaaaaccgattcgtgtttcatatagaaacctctgcggttcatcgggcagcctatgaagatatgtaatgtcagaaaaacgcagatcccattccttatgaagatgcgggttttgcgtatattcccaaagcgtttctatatcagatgcaatattgatttcgacatatatcggcttctgtttcatgccccctcctcttcccttcttttgtaaacaattcctatattatcataggaacagatcaagcggcagaacgaaaaggccatcccgttatcggcaggacagcctcagtggctttgatgacttatgaataaggtatcgtgtcttttttatcttcagaagcgggttgaatgataatcggacgcacgaaacagattaccgcagccgaggccaaaacggctaatccgcctgcaagcaaaaacgccccggagaatgatccgcttttgtccgcgataaagccggttaaagcaggcccgataataccggccgtgtttgcaagaaaatgcataaagccgccgactgacccgacattcctttgatcaaccacatcatgaatcaccgcccaatagatagagcccgttatatataaaaagaaaactgataaagcaacgagaataacggcacttacggtagtggtaacaagtccggcaaatccgatcagtacagcggaagcgaacagacaagtgacaagaatgactttccgtgagaacaaaaccccttttccggcggtttttttgaatacataatcagaaatcattccgcctgccgccaaaccgataaatccaagaatccaaggaataacagtcaccacgctcataaattcaacacttaaaccgcgttctttcaccagatagctcggaaaccatgttaagaagaaaaataaaatgtagttgtaggcgaaaaaggcaaaagccgtgaagagaatcgttttttgtttcaaataaaaggtcatcgggatatgctgctcatgcgactgaatctccgctttcattgccggggcgtcttccgtcggcgccggccgttctttgacaaagttaaaccagatgaccgcccagactaaaccgatgatcatgatcaggacaaaggaaaccttccagctgaacgccacagcaatcatcccgacaatcgggccggagatcgctccgccgagcggcgttccgctgtttgtcaggccgatgactgtggcgcgctgagacggaggaaaccaattgttgaccattttgcttatggcagccgacagcggcccctcccccataccgaataaaacacggataatcaaaagacttacaaatccgaaagcaagcgcaaccgctccgctgaaaagagaccaaacgatcatcgccgtacacaatgtcaatttagccccgtaccggtcagatgcaacaccgccaaggaagttaaacacagcgtatccgacagaaaaactgctgaaaatcagccccatttgggttgccgacaatgtgagatcctgctgtatgaacggcgctgcaatagacagcgctgagcggtctaaatagttaatcacgccggcagaaaataaaagaagaataatagggaatctatcctttgagaacataaaatccccctctcatcatttcataatattcagacatttaaattgccggagtaaaccggtttatgcaatgaagccggttatccggattgccttgcgagcagcgccggtttatagcggtgaatccgtttttcaccgccatctttttcttgtatctggcgaagaagaaggcttcccgcttttcgcgccatttctgccgcaggctgaacgatcgtcgtaatcggaggagtaaaaaaacccgcaaaaggaacttcatcaatcccgatgacggcagccttatccggaattgtcatatcatgctccttcatatacttcagcacctcaacaagaacgatatcgtttgccgccaatatcgctttcggaggctcctcaagtgagaacagctctgacaaaacattggaaatatcagctgcatcggctgttttgatatattcgttccgcaccatcattccgtggcggtcaagcgccttcttatacccttcaatcctttctaccctcggactgatttcccgtataatggacgtcgtaataatcgcgattctctttatgccgctctcgataaaccggtcaacggcaagaccggctgcatgatgattatcaagcatcactgtcggaatcccgagttcttcaatggttctgtccataaacacgaccggaaacgtatcgcgtttcatcttttcatataaagagagattttcgcccgtcggaaaaataataattccgtccacctgcttggcccggagcatttcaatatatttcttttctttttccggttcatcatctgcattgcagacaataatatgaaatccttgttcatgaaaatagtcttcaaccgccctgatgacctgagtggaaaaggtgtgaagaatattagccaccaccacacctaccgtaaatgttgatttctgttttaagctgcgggcgacgaaattcggctgatagttcagctcttgaatagccgcttctattttttgtttcgttttctcgctcatatagtcatagcgctgatttaaaaattgagatacggtgcttttagatacgtttgcatatttcgccacatcagaaattgtaatggttttcatagactcatccccgtctgtcttcatttttcactagtataagtcagaagtaaatggtttacaatctgacagggacatggattctgtcacactccggaataagccataaaacctccgtcgacgggaacggtgaccccggtgacaaagcctgagcatgaatcatccgaaagccacaggagcgttcccagaaggtcttccggtttcccgaaacgtttcatcggtgtatgtgccataatcttattggatcggtctgtcagacttccatcttcctgtaataacaactcacggttttgcgcagtcaaaaagaaacccggagcgatggcattcacccgcagccttttttttgcgaaatgaacagccatccacatcgtaaaattctgaatcgccgccttggccgcgctgtaggcgggcacctttgtcatcggtgtatacgcactcatagaagaaatattaataatcgcgggacattccgccttcaaaaggtcttttccaaacacttgcgatgccagaaatgcaccggtaaagttggttgaaaatacgctggaaaaccctgtttcgtccatatcaaaaaaggatgtgccctgctcatcctcttcatacgtctcgctggcagtgatcgcatcagggtggtttcccccggctccgttaattaaaagattgacagaaccgaaccggctgataatctcgtcttttgccttttcgagcgaatcacgggctgaaacatcagccggtacagaaaccgcggttcctccagcgtcagcaatctcgcccgccgcacgctctgctttatcagcattccggctgacgatcgcaattttcatcccctgccgtgaaagctcctttgccattgctgaacagagaacaccgctcccgcctgttatgacagcggttcttcctgataaacgttcatgaatcggtttcatctcttcacccctttctcatgagacgagaacgcatcccacagtccgttcaagtacataattcctaaggcacgatcatataaaccataacccggccggcattgttcgtcccagatatgacggccgtgatcaggccgtacatatcctttatagtcttggccgtgcaattcttttaccacaccagtaatatcaatggacccatcactggtaagatgcgaagtttccgtaaaatcaccgttatcgcagattttcacatttcgtatatgggcaaacggcgcagctcccgcatagtgtttggcgatcttcaccatatcattggcgggatccgctcccatcgaacccgtgcataacgtaatacaattggcgggtgaatctgaaatctctcgcagcttttcataacttttctcgccggtgataatacggggcaggccaaaaattgaccagggcggatcatccggatgaatggccatttgaatgccgtgttcctccgctacaggaagaatttcatgtaaaaagaactcaagattggcccaaagctgtttttcaccgaccgtttgataggcctcaaacagttccttgatccgggccattttctccggctcccacccgggaagcgtcaaatcagaagattcttcaaccgtgcggatgagttcctccggagggagactttccactttcgctttttcaaaaaacaaagcggttgacccatcctccagcgcgcggaacatatcagtacgcgtccagtcaaatatcggcatgaaattgtaacagatgactttcacgccgaattcggacagattgcgaatggtctgtttataatgctcaatatattgtccgcgttcttcatgaccgagtttaatggcttcatgaacattcacgctttccacgacctctgcatgaaacccataggattgaatgtatctgacttcctcttcaatgccctccttttcccatacttcgcccgcgggcttctggtgaagagcccagacgatgcctttgaccccgggaatttgtctgacatgttcaagagtcaccgtatcattaccttggccgtaccagcgaaacgtgatattcattttacacccccgtatattcgttttttcggcagacgtattctttgctgagggatacggcaacttcatagccgcccttttgatatgcttttgtcaagtcgcttcccacaccgaccgcgaccgctccggcagagagccagtcattcatgctgtttaatgagatacccccggtcggcataatgcggacattcggcagagggccgttgaccgacttgataaatgaagggtcaaacgaattagcggggaacagctttaccacatcacagccggcttcgagcgccaaagccatatcagacacgctcatgcatcccggaagatacggtacgctgtactggttgcatagagatgctatctcttttacaaaatgagagctgacgataaatgaggcgcctgataaaatggcgtgtctcgccgtttctgtatccattacagagccggctccaagaagaatatcttgatgccggagttccttaaagacatcttccacttcaggagttgtgtatgtaagctcaatggcgctgatacctcctgaaatggccgcttttgaaacttcaagcgcctcttggctgttttgtccccttatgacagctaccacttgtgcatacagaagtttttcgtaaatggcgtacttaggcagcattctcgctcctcctttaatcaaacgtaatgattgcttttcccaccttgcccgggtgctgttcgatcaactgaaatgcttgatggacgtcatctgctgaaaatgtatgtgtaataagaccgccgtgcgttaacaggcctttattcagtaagtctgtaatgtacggaaactgattcgtctgcaatcttgaaccggttatcgtgacttccttttttgtgatcggaagctgagaaatgccggcagtcctctcatcaaaaccaagcacaaccacatgaccggccggagaaaccgcgtcaatggacgtttcaaacgttgagggaagacagacggcatcaatgacaacattggcgccttcattttctgtccattcgttcacccgcaaaacgggatcttctttttgcgcgttgacggtaacgtccgcaccgtttttttcagcgaatgccaagcgttcatcattcaagtcggttatcatgacggaagcgcctttgaactttgccatttttaatatgcagattccgatcggtcccgctccctgaaccaaaacggtatcttccttctcgacacggcctctccaaacggcctgggcgccgatcgtatatggttctgccatgaccgcttcctcccagggcagatcgggcgaaacggcatgcagctgcttttccggaaccacgatatattcccgcatcccgccatcttcatgaacgccgaacaccgaaagcgctttgcagacgttcggacgtcctttccggcaggcatagcatgttccgcaataagatatcggttcaaccactacgcggtcacccggcttgaaacgccggacatgagaaccggtctttgcgacttcccctgtgacttcatgtccgattactctcggcagggacgctaacggatttgtcccatgataaatatgcaaatctgatccgcaaattccgacccgcttcaccttgacaagaacatcatccgcatggacaacagacggtttctcacattccgtcaccaccagatcaaatgctttccgtacttgaaccgctttcattttctcacccgctttttaagttgtgcttgctaccgttcaatcacagtctctttgtttacaaatgacagaacctcttctagatagggaagcccttcattgtcaccggaaactgtggtgacgagcgcaccgaccgcattggcaaactccaggcgtttttccggttcaaaaccatgcagataactgtacaggtagccggcattaaagccgtcacccgctcctaccgtgtcaacaggcgcaaccgggaaagcctctttgtgaacccacttatgatcatgatacagcgcagaacctgcttcaccgtcttttatgacgagctgactgattgaataggtctctgcaaaccgggctaatgcttcattttcccctatacctgtcagctgtttcatttcgtcccggcctgccagaagaatatcagtatgcggaaagatttgatgaaatgccgcacgcgcctcctcaatcgtccacagcttcagcctgatattcggatcaaaagatacgggaatctttcttgctttggcgatggaaagcaccctttcagcaatttcaaggtttttcttatcaagcgcgaggaacacaccggtaagatgaacgatgtgaatgccgtcaaacatattctctgttatatcttccggtgcaagagtcagaattggtgaattgaaacggtaataaaacgtcttgcctgaaccgtcatttctgatctctttgacatttaaagatgtaggaaagccttcaacataggagacgtcagtcacatcaattccttctcctttggcaaactgataaaccactctgccgaactcatccttccccagtctgctgacccactttgagtgcagattcaatctggcgcatgcaatcgcaaaattcagttcagctcctcctgcttttcgttcaaaatgggtaacaaaacgcaaaggccctgtgcttgcgggatttaaggtgatcatcgcatcaccgatcgtaaaaatgccataatcagaagccacatcaatactcctttcttttaagactaaatcggtttggtaaaccggtttagtaaaactttatatgaaaacccttacacgagcaagagaaaaatacaataaattcaaaaaaatctattttcggtaaaaataacccggtttttcacataaaaaaacccctcacaacaaaatgtaaggggtttttttgaaaattgtatgcatgtttccttagttagcagtcttacgttcggggcttgtaccttcttcttccgcccatgtttcaatatgcttgagctccggagtattctcggctttgaatacgggatcaagaccttttttgcgctgagcggcataatccttatagatcttgtaggctacattactcagcagtaagattgccactaagttaatgagagccaacagtcccataaacaagtttgccatgtcccagacgatctggaagtcagccaaacatccgtataccaccatcactacaacgaatacgcggtaaatattaagccatgttttgcttgttttaataaattcaatattcgtttcaccatagtaatagttgccgacaactgaactgaatgcgaataaaaacatcgcaatcgcaataaatgtcggggcccagccgccgaggtggtgctgcagtgcggcttgtgtcacttggatgccgtcgcctttaggcgtaaagctgtacaataaaatgataaaagcagtcgatgtacaaacgataaatgtatcaaaaaacacgccgagcgtctgaattaatccctgcttagccggatgcgacacatgtgcagccgctgcggcattcggcgcgcttcccatacccgcttcgttagaaaacaggccgcgctgcgctccgataataatgatgcttcctaagcttccgccgacgatctgttcaagaccgaacgcatttttcacaatcgtagcaaacagctcaggtaccgctgtaatatttacaatcacgacatacagcgcgatcagaatatacatacccgccatgaccggaacgattaattgcgaaacggaaacaacacgtttcagaccgccgaatataatgaaagccgttaatacagctaaaatgattgcgataactgttttattcacatggaatgcttcgtcaaacgcgacagaaatcgtatttgactgcacagcgttaaagataagtccgaaagaaacggtaatcaatacggcgaataaaataccgagccagcgggcgcccagtccctttgccatgtaatatgccggaccgccgcggaattcgtcaccggaacgcactttatacagctgcgccaaggtgctttccacaaagctggaagccataccgacaatcgctacgatccacatccaaaatactgcgccgggaccgcctgttgcaatcgccagcgcgacgccggtcaagtttccggttccgacacgagaagcggctgagataaagaatgcctgcattgaagacactcctttatttccttgcggcttctccccgacgattctgaacatttcaataaagtattggaattgaataaagcgaaaacggaacgtaaagtacaatccgatcccgactaaaatataaacaagatacttccaaataaaatcatttggaacatttatgatttcactgatgaaagcctccatgtttaacctcccttttacatatcttttactgtcatttttgctgcatatgttagatcttttaacacaacgagtattattatatcacaacaacagtggttgagaagtttttttaagaaaatgtttcggtttcttcatcacgtcttttgctgtcatgccccgttttttatcttacagcccgaaaaaatgttgtcacgtcataaggaatgcgtgcatatcataacaaataggtctttaagaaaaaagagatgaaaagatggatggaatggtatatacttaaccaggataataattttttaaatttaataaatatgtttactttacatttaaattagggtattataataaaaatattcagacttatgaaggggggagaacatttgaaaaaaatcttgtttttaaaagcttctattttatttttagcgattgcaagctttcatttgctctccattccccatgcgtttgatactgctcatcattttaaagcggtagccgatcagcaggaaatgcacgaaatgaaggccggccaaaatgctgatgatgagaaaaaatcgctgacgggctcttatatcttgacggcgctttttgccgcttctgtctcactgatcgtgatatcagacaggagacgccctgcttcccggagaagacagcgaaagaaaagctttttaatcgctaaattttatcagtcctcgtatttcgatgagcttcatgttcaacatcgcctatctatgtaacataaaatgaggaggttgttaaacatgttgtttatcttacgaatggtgattttagggttgttttcattcacggcattgaatttatttgtatggcagggaatcgaagtcattcacgctatcactgacttattcggcaaccatgaaagctaaatagtaaaacctccgctcaatgagcggaggttttttttattttatttttactcttaaacatcagacgcggggatacgccatacatctgttaccggccctgtctcatcttcatcggtaaagaaggaaccgttgctgtatcggtcattcgcccgcaaggacttcacggcgatttcgattctctcgcctttttctgtttccgcagcgatcatgtcggccaaagcgcacgcgaatacgccgactgcgcgatgcgggttctttttaagctcacgcagcatgatgacaccgcgcttcgctctggatgttttttcgaattcagataggttcatccgcttgattgctccccgctgtgtgacgaggataagcgaatctgtctcatgcaggatttgtcctgatacgacggtatcaccgtcttttaaatttataccctttacgccggccgcacgggcaccgactacatttacttcatcttcaccgaaccataaaccgtacccgaggcgggtggcgataaacagctggctgccaccgtctgtgacatgaacatcaatcagctcgtcgtcccctttaaggttaagggcaacaagcgctttcgagtaacgctgcgctttgtaatgcgtcatttcagttcttttcaccatgccgtttttcgtcataaacaataaatatgaagatggatcaaattcttttaccggtatagctttcacgatggtttcatcacggtcaatcgtgatgatgttcgttacgtgctgccccatgtctttccacctgatatcaggaagctggtgaaccggacaataaacatagcttcccttattggtaaagagcaggagaacatccgttgtattcatttcaaattggtgaatcagcctgtcagtatccttcataccgaaatcctggccgttagaagcggcaaatgaccgctggcttgttcgttttacatagccgtcttttgtgactgtcacatatacgtcctcagaggcaaccatgacttcaagattgattttaatttcctcaatcttttcttcaatgacagaccgtctgctgtcagcataggtctttttcaattttttcaggctgcttgtaatgacttttaacagctttttatcatgacttaaaatggcttcgagctcctgaattttcttgctgagctcttccgcttcctcttttaacgccgtaatatccgtgtttgtcagacgatacagctgcaaggatacgatcgcttcggcctgcggctccgtaaatgcgaatttagacattaagttttgtttcgcatctttcttgtcgctgcttgcccggatgacggctatgacctcatctaacacagacagtgccttcatcaatccttcaacgatgtggtgccgctcttttgctttttgcaattcaaagacggagcggtttgtcaccacttccttctgatgggaaatatacgcatccaggatggccgtaagactcatcagcatcggccggcggttatgtatggcgaccatattaaagttatatgttgtctgcagatcagtgtttttatataagaaattcagaatgccttttgcatcggcttctttctttaactcaacgaccacccgaagccccgtgcggtcagtttcatcccggacttcagaaatgccttcgacttttttgtctatacggtattcgtccattttctttacgagattggctttgtttacttcaaacggaatttctgtaatgacgatctgctcccgtccgcctcttacggattccacttcagccttgccgcggataataattttgcctttaccggtttcataagctttccgaatgccgtcgactccttgaataatgcctcctgtcggaaagtcaggccctttaatcacctgcatcaagtcatcgacggtgcaatccggagattcaatccgtttaatgacggcatcaatgacctcacccagatgatgagggggaatatcagtcgcatagcccgccgaaatcccggttgatccgttgacaagcaagttagggaacatggcgggcaaaacaaccggctctttactagtgtcatcaaagttcggaacgaattcaaccgtatttttatcaatatcacgcaaaagctctgacgcgatagaagataatctcgcttccgtataacgcatggcagccggcggatcaccgtcaatgcttccgttgttgccgtgcatctcaatcagcacattccgcactttccaatcctggctcatccgcaccatcgcttcataaacggaactatcaccgtgcggatgataattaccgataacgtttccgaccgtttttgccgctttacggaaatttttatcgaatgtatttccgtctgcgtgcatggcgtataaaattctccgctgcaccggctttaaaccgtcacgagcgtcgggcagcgccctgtcttgaataatgtatttactgtagcgtccgaaacggtcgccgattacttcttctaacggtaaatcatgaaataattctggctgtgccactattaaacctcctcagcgaccgacaagttttcattttctaaaatattgctttcctcatctaatccgaaggcaacattcttttcaatccattttcttctcggttctactttgtctcccattaatgtcgttacgcggcgctctacccgtgccgcatcgtcgatcttgactctgacgagcgttcgcgattcgggattcatcgtcgtttcccagagctggtctgcgttcatttctcccagacctttatagcgctggatggtataccctttgccgactttctttaaaacgccgtccatttcttcgtcggaccaagcatattcaataatctctttcttaccgcttcctttgctcactttgtaaagaggcggaagggcgataaagacttttccgtgctcgattaaaggtttcatatagcggtagaaaaacgttaacagcaagacttgaatgtgcgcgccgtcggtatccgcgtccgtcatgataatgatcttgtcatagttgatgtcgtctatctcaaaatctgcgccgacaccgcctccgatcgcatgaataatcgtattgatttcttcatttttgaagatgtctgcaagctttgctttctctgtgttgatgacctttccgcgaaggggcagcacggcttggaatttccggtctcttccctgttttgcagaacctcccgcagagtctccttccacaagatacaattcattcttcgccggatttctggaaccggccggtgtgagttttccgctcagcgtcgcttctgattttttgcgctttttgccgcttctcgcttcttctctcgctttacgggctgcttcacgggcctggctggctttaatcgcttttttgacaagcagggttgccgtatcgcggttttcttccaagaaataagcaagattctcggaaatgacggcgtccgcggcggatctcgcctcacttgtgccaagcttccctttcgtctggccttcaaattgcagcagttcctccgggatacgcacggaaataattgcggacaaaccttccctgatatcggcgccttcaaggttcttgtctttctcttttaaaagggcgacctttcgcgcatactcgttaaacgctcttgtcattgccgttttggctcctgattcgtgggtgccgccgtcctttgttctgacgttattaacgaatgacagcatattttctgaatatccgtcattaaactgaaacgcgaaatcgacttcaatgtcatgatgctcgccttcaaaggaaaccacttcgcataaagcgtctttttcctcgtttaaataagcgacaaatgcttcaattccgttctcataataaaatacttcttttacgccgttccgttcatcaattaattctattttcaaaccttttaacaagaaagccgattcgcgcagacgttctgacagcgtgtcaaaattataaaccgttgcgctgaacattgacggatcaggtttaaaatgggtaagcgttcccgtttttttggtcgttccgattttttcaagtgaagtcacgggcttgccgccgttttcaaaccgctgtttataaacatatccgtcacgctcaatagtaaccgtcagccactccgataatgcgtttacgacagatgcgccgacaccatgcagaccgccgcttgttttatagccgccctgtccgaacttccccccggcatgcagcacggtgaaaataacttccggcgtcggctttccgagcttatgcatcccggtcggcattccgcgtcctctgtcctgtacagagatgctgttgtccttatgtatcgttacgataatatgatctccgtagccggcaagaacttcatcgacggaattgtcgacgatctcatatacgagatggtgcaggccgcgtgcgtccgtcgaaccgatgtacattcccggtcgttttctgacggcttccaggccttcaagcacctgtatggcatcttcgttgtaatcaaattgctgttttctagccaaacgtacaaacccctttcaaaaaacctgctcttaatcattctcttttttaaatgttttcatgtctttgtttttcagtatgcgcaagcttcgatccaattctcctcggactcacaattataaccaatatgcttgatttcgcaacatatttaagcgaatggctcgttttttaggccgcaagacatacattcgaacggcttttcatctttttggtgcccttttcggcggataagaacatgagttcgctttctattatatagctttatgcgggccatcgcaaacagactgtaaacccctgtataaaggggtttctaaaaaagctgttcatgctttattgtatctgtttcatcatcatacgcaaagagtattctttcaataaaaaagcaaaaacccctgatttgccaaggatttttgccttttttgttcctattttataacagcgcgggcgacttttatacataaatccataacagccgtccgtcctttgtctgtaatcatgcgatacgcttcttcatttgcaagaccctgctgcgcccaaaaaacgggagcgtccgtctgtaaaaattcttcagcgacgccgggaagctgctcagagcgtctgaacacattcacgatatcaatcggtccttccacgtcttttaatgaagcgacggctttaacgccaagcgcctcatcaatcgttggattgacgggaataatttcatacccttcatcctgcatcgctttggaaaccatgtaagaagtccggtcgggacggtctgacagcccgacgactgcgatccgtttgctccggtccagaatttctttaatctctgattttgaaggattttgcatctttaccatctccttttgatatattgtacatgaccgctttgccggaatcaaaaaaagcgctttgtcagcttaattctcaaaaaaacttgtcatcagacggtaacaactcgtgttaaaatagagtgaagggacattgaaaaggagaaatgtagatgttgattgctttattgattattttggcctatgtaataggcagcatcccgtcaggtttaatcgtaggcaaacttgcgaaagggatcgatattagagaacacggaagcggcaatttgggcgctacaaatgcttttcgcacgcttggcgttaaagcgggatctgtcgtcgtcgcagccgatattttaaaaggcaccctggctgcggcgctcccatatttactgcacgtccccattcatcctcttctcgcaggggtggcagcagtgatcggccatgtattccccgtgttcgcaaagtttaaaggaggcaaagccgtagccacatcagggggcgtcctgctgttttatgctccgctgttattcgttacgatggttgcagtatttttcgtatttttattccttacgaaatttgtttctctgtcttcaatgttaacagggatttatacgattatttactgtctgtttgtaaaagacccttatttattaatcgtagtgacgcttttgaccgcgtttgttatctacagacacagggcaaacatcaaacggattataaacaaaacagaaccgaagatcaaatggttttgatgaaacttcaattttgacatcaaaatgccatatgcgtttataatagagataatttctttatatgagaaacaaaaagggagtgttccggatgaacatgaaagtaacgaaaggcgcgctggattggtacaaagaagagctcgatctggaaacaggcgaccatgtccgtttctttgtccgttacgggggatgcagcaacgttcagaaaggcttttctctcggcattttaaaagaccggccgatgaacatcggcaccagcacggaagttgaaggcattaccttttttattgaagaaagcgacttatggtactttgataatcatgatttgtcagtcacatattcagatcaggcagaagagccggtatttgattacgtgtaaaaaaaagaacgcagcggatgcgttcttttttttacagcctgaaccttttgagatgatcagtcagacgttctttttctaatatgcttctttgcgtatcaccgagcaggtcaaagtggggaaattcatttttatggtgaatccactccggcttcagcccatactccgctccccatctgatcagcttattgagatcgcttgaaccggccttcgtcacggtcttagcctccggaaagcggtcgtccagccagtaatgcgttaaaaaagcgattttcccttccgatacatcccgcttccatctttccagttccttacgcgtaattccaaatgccataactgcagccgctccttatttttttgccttttcgtaagcggcatgccaatcaggaaaagctttgcgaaactgaatcggtttgaagctctctttatcaacgcatatatgggaggatgtcgctttgatggcaagttcttgatccggattatagatgtggtagccgtaaacggttttaaatccgttatattcttcaatccaagtatgtacgacagccgtttctccgtagcggagcggctttttataagaaatgctgatatccaatacaggggacagcactcctctatcttccatatccttgtaaaggaatccgagttccttaatcagcgccgttctgccgacctccatccagactaagtaattggcatgatagacgatgcccatttgatctgtttccgcataacgcacttctatttctttttttgacacatgcaacgttctctgctcccttattatcagattagccccattttatcacaacgagccggaaagagaaaaaaaccaggtttccctggtttttattatgattgatagccgttttctcttgcagccgattcatcctggatttcactgcggaacgattcaatgctttcattgcgtctggcattcttctcttgaatgcgctgtttttcctcatctgtcgcaaattccattgattctttggcttcttctatattctcaattgtattctgcaccatatcctgcagcttttcaacgttatcggagcggtcatccggattcggtttttgataattgtttgtcataatgtctgctctcctttgatgatgttattcgcctttcgtctgcatgacaatcggatgtccgtttgacttgtcatgaaacttttcccctttgttgcgtttatatttaacgggttttgtccctaagtggctcggagcgtattgcggctggccgtctttcttgtttatgcccatgttcatccctccttaagagtatattttgcaaaaggaggtgcaaacatgactgcaaattaaaggttatttttgtttgaaccgctgctccagcttttcttcaagctgattcaaatattccgtattggtcatcagctcacgtttattttccataaccaattcatgaaaagaacgttttcgcatttttttcaatcttctcacctccgtgttttcattcattttttccaatttttcaaaacctaagcccttcacaataaaaaaactgaacctctatttgagatccagtttttctttcatttctttttttgtcatcgtgcctacgcgaatatgctgaatggttcctttttcatctaatatgtatgttgtcggataagaaagcacgttgaaatctccattaattccgcttttgtcaatcagaataggaaaggtcagctgataatgatcagcaaatgatttcacagcctgtatatttttttcagaggacgtaaaattaacggctgctaccgcaatatcaggatattctttctgcagctcctgcatatcgggcatttccattcggcacggcttgcaccacgtcgcccagaaattgaggagcactttttttcctttataatcagaaagggagatactttttcctgacaatgtatcaagtgtaaagtcaggggctttcatcccttcttctgtcccttctttcggacttttttgtacagagtaaatgttccagcccgcatacactaacaacccgataagtaacattccgcccagccatttcgcaagcatctcaaggcctcccgcataaaaagagagaaagcagactgctttctctcctttgttcattctgctactgtttcattttatcgcgaagcaccatttgtaaaatgccgccgtggcgatagtaatcaatttccacttcactgtcaaaacggacaacaacttcaaatgtttttaccttaccgtcttcactgattgctctgacagtcagcaagtcacgcggacgtacagattcatcaacatccacctcgatgacttccttaccggttaagccgagtgtatccgcgttttcaccctgtttgaactggagcggcagcacacccataaagacgaggttgcttctgtgaattctttcaaagctttcggcaatgactgttctgataccgagcaggtttgttccttttgcagcccagtcacgtgaagagcccattccgtaatcttttccggccaggacgacaagacccgttttatcttctttataccgcatgcaggcatcataaatagatgtcactttcccggtaggccaatgtgttgtgtatccgccttctgtacccggtgcgatttggtttttaatgcggatattggcgaatgttcctctcatcatgacttcatggtttccgcggcgtgagccgtaagagttaaagtcacgaggagaaacgcctttttcctgcaggtatttgcccgccggtgtgtcttttccgatcgctccggccggagaaatgtggtcagtcgtcacggaatcgccgaatttgccgacaacgcgaagtcctcttaaaggctcaacttttcccggctctacagacatttcctcaaagaacggcgggttttgaatgtaagtggaatcctgatcccacttatacagcgcttcatccgtcgtttcgatttcgttccagcgctggttgtcgtcaaataccgtttcatactctttgcggaataattccggcgtaacagtctgtttgacgagagaattgatttcatccatggacggccagatgtcatcgaaataaacattttgtccgtcatttccgacaccgatcggatccgttttcaggttgatattcacagtgcctgctaatgcgtatgcgacaacaagcggaggtgacgcaaggtagtttcctttgacaagcggatggatccggccttcaaagtttctgttacccgacaagacagaagtgatcaagagatcatttttagcaaccgcttcttcaatctctggagaaagcgggccggagttcccgatacatgtcgtacagccataccctacgaggttaaagccgagctccttcatgtaaggaagcaggcctgagttgactaagtatccagtaacaaccttagaccccggtgcaagtgatgttttaacataattcggcactttcaagcctaattctaccgcttttttggctaccaatccggcaccgattaatacaaaagggtttgatgtattcgtacagcttgtaatagcggcgattgcaatcgcccctgttttcataaccgcatcttcaccgctgttaagtttaaatgaaatttctttgttctcttcagcagcatccgctccgaatccttggttgccggccgggctgacaagatgttttttaaacgtttcctgcataacggaaagcgggattaaatcctgcggacgtttcggtcctgaaaggttcgcttcgatttttgacagatcaatttccacaacgtctgtaaaaatcggctcttccgcgtcaggcgtatagaataaaccgttgttgcggcagtatgcttccacaatatcgatctgctcttcttcacggccggtcagacgcaggtaagaaagtgcttcctcgtcaaccgggaagaatccgcaagtcgctccgtattccggcgccatattggcaatagtcgcacgatccgcaagcggaagctcagcaacaccaggaccgaagaattcaacaaatttattgactacacctttttcgcgcagcacttgagtgactttcagcgccaagtcagtcgccgtcgttccgttaggtaattttccgacaagtttcgcgccgatgacctcaggaacagggaaatatgaaggctggccgagcattcccgcttccgcctcaataccgccgacaccccagccgaggacgccgattccgttaatcattgttgtatgggaatctgttcccaccaaagtatcaggatatgtcacaagttctccgtcttcctctttcgtatgaacaacacttgccaaaaactcaaggtttacctggtgaacgatacctgttgcaggcggaaccgcctgataattgttaaacgctttctttgcccagcttaaaaatttataacgttctgcatttctttcgaattctaagtccatattaatggctaacgcgtcttccgtaccggctttgtcgacttgtacggagtggtcaatgaccaggtcaaccggaatttcaggattgattttatcagggtctccgccgacagaggccatggcttttcttaaagatgccaggtcaactacggccggaacaccggtaaagtcctgtagaataacccgtgacggtttaaacggcacatcgatatcttttaattcagcagtaccccatcttgctaaattttcaacatgttcttttgtaatgacgcgtccgtctacctgacgcaaaacggattccaaaagaaccttaatagaataaggaagttttgaaacattgccgacccctgcgtcttccaatgcttttaatgaatagtagttgtatgttttcccatttgaagaaaatgtttttcttgcttggaaaacgtcttgtgttgcgactttttgctgatttgtcattctccaaaatcccccttcaatgatcaagatcgttctttagatgaatgttcacattccatcacaattttctcacaatttcatcttagtataaaattatacataagtaaatatcaatgtttttattaaatacaataagatcgtcttatcagcatgattttcggtaaattttgtccgattttccgcctcatacaacgggctgtaaagagccatattaatgttgaggtgatgatcatggtaaaacggaaagccaatcatgtaatgaacggcatgaatgatgcgaaaagccaaggcaaaggcgcgggctatatagaaaatgaccagctcgtcctgacggaagaagaacggcagaacaataaaaaaagaaaaacaaaccaatagccggaacacctttaaaaggaggctttaacatgacaaataaaaatacgagtaaagatatgcataaaaatgctccgaagggccataaccccggccagccggaaccgctgagcggaagcaaaaaagtaaaaaaccgcaaccatacaagacaaaaacataatacaagccacgatatgtaaaacagaccccggtgtctgttttttttgtgccattcacccattcaaagcttctgcatacgttatagcaaggctttttaatatggagggatgcttccatgaatcactcaaaaaacgctgaagaatttgatgatacggaagaatggctgcggcagttttacgaggacccgtatgcttggtatgacgagacgctgccgatcgatctatatgaaacaagccgtcaatatatcattgaagccgacctgacggcgctgaagcaggtgcaagcgataaccgtcactctttcgggaaatgagtttatgctctctgttaaaacgcttgaacggacgttaaacaaacaaatggtgcttcctttttatctgaatgacaaacatattttcactgatttcaccaaccatattctgaccgtctccatgaacaaggagccaaatgagactcctgcctctttttcctttcaatttcctctataacataaaaaagccgctttcatccctcaatggaagcggcttttttgtccggtcatatcagtcatataccctcaaagtgaatctcccatggccaaatagcagaatcactatacgatagaatatgttctagcaaccggaatgactggacatctatcattttttctattcttttttcatgtgttcttctattctgtcttcgtttacaatatggttaaagtaaggaggtgatagaacaatgctggaaggctggtttatgtggtttattttattttgggtcatcgtgatgatcggattgctgtctatcggcgggttttttatgtttcgaaaatttttaaaacgcttaccgaaagaagacggccggtcagaactggattggcaggactattatattgaaaaaagcaggcacttatggaatgagggtgacaaggcgtttttggatgaattggtcgcccccgtgccggagctctttcgggatgtagccaaagcgaaaatcgccggaaaaatcggtgaactttccttagcggaggaagctgaacaaataaaccgtgatttaatcatcaggggttacatactggccactcctaagcgggatcatcaatttttaaaaaagcatctccgtgaaaaacagattgatcttactccttatcaagccctgctcaaataaaaaacctttccggcggacggaaaggttttaattcatctgaatatcagcggtcttcagttcattcgaaagtttgcggtaagacaaaaacatcgcgatgcgccacgggacaatcattccgaaagcaagaatccaaaacattccgcttaaagctccgtaatcaatcgtcgtgctcaaaatggatttcatagcgattctgataaccagcaaaccaatcaggataaacacaaacgcttttgaccgttttaagtagatttcattatttttaatctcaaatttagatgttttaatcagaaaaatagagaagatcacgcccagcgtaatggcctccaaaaattcttcgcccgtcactctgaaaatcggaaaaaggaacataagcgctcccgtactcatgaaaatcggcgggagaattatttttttaggtgaagcgggcttgtcggaggatttaatcctgacgatcatcacggaaattgccatggccgctgcaataacggatgaaattataatcatcatctttatcattcctttgcttgcacggagtttgatactatatactatactccaaaaacataaaaaaaaccaatttgaaaagagaacacgtttacgttcccgttacccggcctacggcctccagcactttagatgcttcaaacggtttaacgataaagtctttagcgcctaattcaatcgcttccagaacgatccgctgctgccgcatggcggtgcacatgatgatccgggctttcgggtcaaaagctaaaatatcctgcagcgcctgtataccgtttttgaccggcatggtaatatccatagtcaccaggtcgggacggattttttgatatactgccagagcttcctcaccgtcagccgcttccccggccactgtgtaattcgccgattccagaatctctctgattttcaccctcatgaacttggcgtcatctacaactaaaactcgtgtcatattcccctccacatatttaacattaactagtcttattgtaccaaaaacaaaagggtatataatagttcaaaagttattaatccgttacagacccgtaaatcctccgaaaagatttgacagaacgatcagaatgtagctcatccagttaaaaaacagcataactccgatcagaatcataagaatgccgccgattttcatgataagcagctgatgcttgcgaatccaattcattctggtaataaaaaatgaaagaacaagaaaaggaatcgcaaatccgagaacatataaaaacatatacggcactgctgaagaaggatttgtattagccagcgaaaataccgctcctaaaataggcccgctgcacggcgaccagccggctgcaaacgcaagaccgatcagaaccgaaccgataaacccctccggacggcgcttaaagtgaatgcgccgctctttcatcatgaatttcggctgaaacacaccggcagtaatcagcccgaaaaggatcagcatgatagcgccaaactggcggatcgcttcatgatattgggtaaaaaaactgccgataaacgaagttccatatcccaatgcgataaaaatcacggagaaaccaagcaaaaaacaaagtgtatgcacgaggccgcgcttttgcagcatcaccttttctgttttcacctcgtccatactgacaccagttatgtaagacaaaaaagcgggatacaacggcagacagcatggagaaatgaaagacagaaatccggccccaaacgtcagaaagtaattaaaactcacgatgacacactcccttcgagttatgacaaaatcatttcatttttttaacactttcccgagaaggattactttttatagaaaaagcttatataatttaatttgacatcgagatattatactccttcttatttgaaaaacagtataaatgtggatataataatagcgactcaggtgaaagatttatgtatgaaaggatatatccctgtgattagagagcatctattaaatgaaattgaaaaaaaacgggcagagctgcttaaaatcgtcatgacaaacggaatgacatcaaacattacgatagaactcagccaggagcttgaccaccttctcatacaataccaaaaagaactgcacaccggcagttggggtgaaacatgacgtcaaaataaaaaaccctctccgggttttttatttttataaccatgtatctctatatcataatctgtacgtattatttcgcttgattattcatggctttcatcatttgattaattttcttttgagaaggtttcattcccatttgcatcatcatcatgcgtaacatttgttcattaataggcggattctttttcaaatagctcatcatatatttacgagcaataaaaaacccgagtgcaacacctatgagcaatgcgacaacgcccactaggatgccaacccataaagtcattttatttcctccttcatgttgtctagtttaaagtgtactaaaccaaaggctattatacaacatttacatctctttttcctcgtttttagacaaaatttctttctctgaccggatttaaccacccgtagcgccgtgtcttgaaatccattgcaagaaaacaggggctgattttacgcagaatctcaaagaaaatcgtttccgcctcataatctcccgaagctgcaatctcaattaaactgtctttcatcatgaaggtggcgcggcccttttctccgggcagtgtaagccggtaaatggaatccaaacggctgtaactcattcggtttaaatgcagctggagacgctgatgcatatgtatcaccggaatcggttccgttatatattgaacttgcttttctgtcatttgatattcctggggtgtcaggtctgtccaatgatagtctcgaaacaactcaaacatagccgtttcccgcccgaagtagtggttcgcaaactcatcctttatcaggtgcgtatagtaatgacgttccatttcctcatccccttttacagcgcttcgttattgctttctattatacaaaaggagaaaagaaagaattgtctattactgttacgccgccccttctatttttgtcgcataaacaggaaaaagaggatgatttgactcatcctcttttgtctcgttatttgtttaaaagttttttcacacggtcaaccacgttttctgcagtaaacccgtattctttcataattgtttctcccggagctgaagcaccgaaacggtcaattgcgagaacgtctccttcaagaccggtaaatttaccccatccgaagcttgaacccatttcgatcgcaagacgtttcgtcacattcggaggaagcacgctgtttttgtactcggccgattgtttttcaaagcggtcccagctcggcatgctgactacagatacgtgaatgttttcttcagccagtttcgcttgagcttcgatcgcaagtccgacttcagaacctgtcgctaaaagaagagcggccggtgattccgtttgggctttggaaacgatataagcccctttttccacgcccgcatacgcttcttcagcctgctgatcaatcgtcggcaggttttggcgtgtcaatacaagagctgtcggatgatcttggctttgaacggcaaccttccatgcagctgcggtttcatttccgtcagcaggtctgatcacagaaaggttaggaagtgcgcgtaaagaagcaagctgctcaatcggttcgtgagtcggcccgtcctctcctacggcaatactgtcatgtgtgaatacataagtgacgggaagacccatcaatgacgccagacgaatggcaggtcttaaataatcagagaacacaaagaatgtgccgccgaatacgcgaaggccgccgtgaagcgccattccgtttaatgcagcgcccatcgcaaattcacggacaccgaaccagaagtttttcccggcgtagtctttggccgtgaagtctcctccatttttgattgtcgttttatttgaacccgcaaggtcagcagatcccccgacaaagaaaggaattttcttagcgatcccgttcagcacctcacctgaagatgcgcgggaagcaaggctgctgcctttttcataaacgggaacttcctgatcccagtctttaggaagctcgcctttcatgccgagtgacagctgttcagcaagctcaggatatttttctttataagccgcgaacagttcattccattcctgttcttttttcgaaccggcttcttttacagcttgattgaaatgcccgtatacttcttccggaacataaaaatcttcttcaaacgtccaagcatacgcttcttttgtcagcttgctctcttctagtcctaacggagcgccgtgaacgccggatgtgcccgcgcggtttggagaaccgaaaccgatcgtggttttcacttcaatcaaagtcggttttttatcattctggcgcgctttttcaattgcagccgtcaattcagcgatgttgtttccgtcctcaacataaagaacttcccagttcattgcttcaaaacgctgctttacattttcagagaaagaacggtctaaatcgccgtctaaagaaatgtcattagaatcgtataatacgatcaggcggcctaattcaagatggcctgcaagagaagcggcttcggaagaaatgccttccattaaatcaccgtctccgcaaatactgtatgtataatgatcaactacgttgaaagaatcacggttatatgtctcagccagatggcgttctgcaattgccattcccactgccattgcaataccctgtccaagcggcccggtcgttgcgtctactccggctgtgtgtccgaactccggatgtcccggtgttttgcttccccattgacggaactgtttcaagtcttcaatgctgaggtcatatccgcttaaatgcagcatgctgtataaaagcattgaaccgtggcctgctgataaaacaaagcggtcgcggttaaaccagcccggattctgcggatttacattcataaatttcgtccacagcgtgtatgccatcggagcagctcccatcggcatgcccggatgtccggaattcgctttttcaattgcgtctatagatagtgtacgaatggtggcaactgatttcttttcaattgtatccattataatccccttccatattgttgtaccttttcatcataaagcgatgctgactttttctcaactctttcagcttaaatttgagataaacttgttgaaaattgtcgtaaagcacatcctgatattagtatatacgaaaaaagaatacgtattgccgtattctttctgtttaatgaagattatttttctgttgttctctttttaatttttcaggggtgacatcgttgccttccggatcaatcacttttacgctctttaacgtatttttcattgaggagcggaatcctttcaaatactcctggcgaagcttttgctgttcagctttttcctcatccgttatcgtgtttgatttagctttttgagccaattcgttaattcttgcgattttttctttagaaatcataataagctcctttggtgcgtgttgattatatactactaaaacgcagtcttttttacaactgatgcgcgtcagctgccttctgtgtctgcggtatattcctgaaaccgccggtgaaccgtggctttggacacatcgtagccgaatccccttaaggtcgctgcgatttctgcaaaggtaagcttgttggctctcagcctgataatttccgaaaccggaacctcttttttttcttttccgctgttttcatgcctgtttttcagattccgttcaggtttgtagccgtttttcacggctcttttcattccccgccggattttcatattgtgaattttcctttgatattcctcaacaatactgacgatttcgagtaccatcgaatcagcttcagaaagctccagttcacctttatgagcagtcgtatatattttcacattctccctgtaaatacaatgcaaaagcgcaatcttggcgtttcctcttcccaatctcgtttcgtcctgcaccaatatcgcgtcaatatgtgattttttaatttcatcaagcatttcaaatactccgtcgcggtccatttcgtaaccgctggctttctcagaaatgactttcacgacttccatgccgtttgcagcagcgatctcactgagctcctcttcctgtctttttaatgacgtttgctgctgttctttgtttgtgcttacgcgggcataaatgagcgccttcatttctctctttcctctctaattgacaatggccagctgatatacggccggatgcttcttcttaactggaagaataagttcgtctccgggctttatatcagcagtttggagatgattattctccgtcacccactcaatgaaatcttctttattaatgtgtttcttttctgctacatgatccgcaagtgaccagagtgtatcgccgtcctgaacctttattttaacatattggctgagggactgatcattccccgcatatgagacaagtaaaatagcggcacttaaaattgcagtaaacagcccgacaaatataatagattctttcgccatgtaaacaacctccgataagaatgtttgttcgctttttatacctttcagtatatacgaacaaacgtttctgtcaatcgtttttttcgaacctatgtttgtactatcaggaaaatcatgctataatctacttaaaatcgacgttttgaggtgcgaaatatgacgaagctatcaaaaaggcagcttgatatcctgcgttttattaaagaagaggtaaaaacgaaaggatatccgccttctgtaagagagataggagaagcagtaggactggcttccagttcaaccgtgcacggccatttggcgcggctggagacaaaaggcctgatcagacgggaccctactaaaccgagggcgattgaggtattggatgaagaagaagtccaaattccgaaaagccaggtcgtaaacgttccggtcatcgggaaagtgacggcgggtattccgattacggctgttgaaaatatcgacgagtattttccgcttcctgaccggatggttcctccgggcgaacatgtctttatgttagaaatcatgggagaaagtatgatcgacgccggcatttttgacaaagattacgtcattgtcaaacagcagaacacggccaataacggagaaatcgtcgtagctatgaccgaagatgatgaagcgacggtcaagcgcttctataaagaagacaattatgtgcggctgcagccggaaaatccgacgatggagccgattatcctgcaaaacgtaagcattttgggaaaagttatcggcgtattcagagccgtacattaattctattaaacttcatttatcgtaaaaaacccctctgtaaggggtttttttgcataaaaaaagcagattcgccctggcttaaaaaacgaatctgctaaggaggaaaaacttacattcttattatccgacatcacacttttgaagtcaactaataatgtttccctcaagaaacttttcatccatttttcaactttgtatatttgtgcgtgatgattttgcttttgtttatcttttctttgggcgggtgcatcaaaatttatatgtgaatatttagtacatggtacgataagttatatttaaatataaaaaaacccgctgcctttagcgagtatctattttcaatcaaaatgataatattctacaccgtataaccctttaatatagacggggccacagacgtttgaagaactttcaaccagaatcctgtatttgtgatacggatcaattgattttttatcctgggcactgaggtttaaccagctgccgctgtaggttttagaacttaatgtataaaaatttccgttcagcgccatccgttggagtttcatgcttaaaccgcacgaagagttgttcattatggtgaacttatatcctaaaaagtaatcgtcggcagctacagcccccggattttcaatatgaaactcttttgcatttccctccaaagtgaagcttgtttttgatccgaattcagtggtagccgctttagctgagtgtattccgctaaaacataataaaaaaacagcaatacatatccagtattttttcatttgcatccccctttttacatattttaacttgcgaatcctgtgatgtctattcacattttattaaaacgtatactttataaccactatataccagtttaaaaatttgcggattgcttacaatgaagactaaacgaaataacgaaggtggttcaaatgaaacacgtaattgctttcgcttctaaaacggcgctcacacttgctttactgtacattgttctggatcttatgtaccaagtaacctttttaaacgttctgtttattacagtgatcttaagtttaatcacttattttgcgggtgattgcatgattctgccgagaacaagcaatttcacagccgttgcagctgatttcgggatttcattcattatattatggatattccttatgaacattggcggatttaatgtctctcctgccgcggcatcggttatctctgcactttgcatttctgtttttgaggcattttttcaccggtatttgcagcaatatgtacttcccgaagattatcaggacacaacagagacggatagcacactatggagctatcaaaccgaggcgtctgaagaattagtgccggaaaaagatcctcaggaaaaaacataaaaaggaggcattcgcctccttctctttttattttacttctgatcgtccagcggcagctgcagcagtgagtctgtgcctgtcgctttcggcgtttttccgtcccatttttcaatccatttatatttgatcatttcatctgacattgatttctttatgatttggttgtaatcagcgatcccttccgcttcaatttttttctttttcgcttcggcttcggctattttaatttcagtttgtgtccgttcaagttcctgtgaagacttcacccttgcatcaatggcttcctgtgtggctttatccggcttcggtacgccaagcgtcagatcatcaattaaaaatccaagactcttcatatcatcagcaaatcgcttttggacatcagcagcggcttctgcagatttttgcccgtatgtgtcaataaccgagtatttgctgattgattttcgcgccgcatcccacagccttgtttttaaatatgtattttcaatcgtttcaacgtctaccgcgccgaatttgttaaacagatcgactactttatcaggctgcacgacatagttgtaagcgatatccatttcaatatttttaccgtctgaggttgccacttttatattttcattattcactgtctgcatacgcaccggatattccgttactttattaaataatccgactaagtgccagccttggtccaatgtatcggattttaccccgccattcggtgagtatacaaccccgacataaccgttcggtattttttcaatgaatagtgacgctgtaacgcccgcaattaaaagggctgcacctataatcacaccgccgataattttttttgtgtttccgcgcttattttcgctcatgctgatcttcttcctcccatgactttttgaattttttggctttgcttcccacttgtttaaagattggactaagcatcagccataaaccgaatccgatgatgacaagaagaatgatagacccgatcatcactttcatttgcccacctcttttctttcatcctgtcaattatgtatacgatcttaagaacttaaagtttcataaatttcaaaagaaaaagccccgccggcaaaataggcgtgcttattaataattgtcactgataaaatcagaaatcgtttttgtgaattgataaaaggttccattttgtgtggatgctctgcttttcagcgtaaaagtgtcaaatagtgattttctgaagccggtgctcatttcgatttgaatactcaatccggatgaagattgattggcaaggttgttcggactgacgcctgcatatttatcatttatgccaagaagaacggcaggatacccgtgtcgtttcagcacatcggtcaaaagttcggcccgttctctgtctgtaccgccgatttttatctttttatcgtcactgccgtaaccgtgcaatgaaatgacattagagtgctctttcaccatttgcacggccttcggttcatcgaaatgcgaacttgtcaaatgcagagccgcattaccggctggttttaacccttcaaataaatataaaccccggttttcggcaatttctctggctaactcactggtccccggctctatgcctccgccgtgtatagctaatatgaggacagaagggtcatgctctcgcgttgaaatggaaaaatcggaaggatcttcattcagctttaattcctcgaaaccgccgtaaatatctgaagcggcattagcctgaaagaacggcaggagcaaaaacggtaaaattaaaactgaaattccttttttggttattgatggcatttgtatgtttatgttacaatacaaatgcttcagcctttgaagcgaacggcagaacagggtgactttggacggtttcttctgctctgcctctttgccagctgctttacgctctactcttctaaccctttttgccataacatcatcctttcttttgtttacacttttgtcacaatattatatacgttggacaaaacctccgttcatcttgaagaataaaaacatcaaaacaacctctatcctttaacctaaaaaagtctttctgtcaaagagacggaaagcttaaatgataaaaatgaaacccttctccttagttttggaagagagtgaagactgcaagaaatcattttatcaatatgctgagctgggctggcgtccggctcaaatatttgctcccggcataaacggttacggagcggccgcttatttcgaagtcaattttgaacgtgacgtatgatttcccaattcaagaatcaccgaaacaaattgaatgtaactgctgtttccacaaaaaaaagactgctgtttagcagtcttttttcgttttatttcgtgcctgttgatcccagtccgccgcgatcattgttcccgagcttgtctacttcgatcagctccacttcaggcattttcttcatgattctgaattggcagatccgctcccccttggaaatgtcggtatcccgaagcgcgaatgcaggaaaaaaccagaagtcattgtcgcctttataagattcatcaatgactcccattgaatttgtctgaatgataccgaaatgcttatatgtacttgaacgcggaacgacatgggcctcatatccttccggcagttccatcgcaactccaagcgggataagtttgaattcaccttttttgattgttatatcttcagctgcccgcagatcaatccaatcgccctgttcaattttactgattctcgtttgcgtatcatctgaatatttaattttgatttgtaaagtcatgttcgctgctccttttgctttcctatttcagtcgtattgatgaccaatccgtgccccattataccatttaactattaagaatgttgattttggtgtatatgcagccgaagaggaagcactgcgaattcattgagaataaacctaaaatgagggcccctcctatcagttttttcctccattttcacatgacagcttcaataacaataatgcaaagctttatatccgttctttcaccagagcttttttaaaatttcaccttggtttcaaaaggaatttcgttctgaataaagaatttgaagaataagcgcttaaagggcgcgcgactcttttctgtcccctgcctcaggcgcttatatcaaaagaaagaggtgtctttagaatggttcaatttaaaaactttcctgatccgtctttaaacgccccattgcagtctcgccctgcacagccctctgaattggagcatctcaaagcaaggatgcagaattttattaagcattccgcaacggatgataatcttgagatcgcagatgcccgggtgacggcggaaggaatggtcacctcacttttaaaagaacggcttgatacagaatacgaaatgcttaagaataaaatcacccgggaagtgaatgtggaggactacggagcgatccctgacggccgggacaatacggaagcctttcggagagcgatcgggaacggccgggtcaaagtaaatgttcccgcaggagaatttttggttcaagggataaaactcccctcatggactaccatttccggtgagggccaagggattaccgtgctaaagcttcatgaggacactcccgcatacgaatgggtcattactaacgatgattacgaaaatggaaaccgtaatatttttgtccagaacatgactttagactggaatcctgatcgtcaatgcggggtcaggaaccccggaggacagttttccagctgtttaacgtttgctaatgtgcaatacggctggattaagaatgttgaaacggttaacgcgggtctccatggtattgatattacatctccgacttacgatcatttgcctgaaacagaatggacgaaagacgggtgccgatatatatggattgataactgtgtggcatacggcgccggagacgacggcattaccacccattacagcgaatatattttcatttccaattgccattccggaaacccccgcggcacagagcatgctgagggcagcgcaaactcgaacggcattgaaattgacgacggctctaaacatgtgtggcttttaaataactatacgagcggaaatatccgcgggattgaggtaaaggcgcacagcctgtggccggcttctcaaaatgttcatattatcggtcatgtttcgtatcgtgatgtacgttcatttgatattcgtcatatcggccatcatcaggcctcagaccccgaaagcacgacggcttatgatgttactttaaccgattgcaccgcgattgaaccggtgtttaatgctctctatgacggtgtgaccccgagggcgctggtcatctctgcctataaaaacgttaatgtaaacggattcacagctattggtgatccctcatacgactatggcgggaatccagtcgtggctcttcaataccgcagtcaaaatattacgattaacggcattaaaatacgcggctttacacaagccggtgttgacatcaatatatccggcggatcaaataaaaccgattatgttaaaattttaaattttgatatatacaagtcttctcctaaaggcatctcaatcggcggaggccaatataacgtaaatattatgaacggtacgatgatcggagacggcggttccgtcggaattacgtcccctaacagtcaggccgtcattctcggggtgcaagcggaaggttacagcgcggccgcatctataaaaggacagacttatgagcagatccccgtcaatttaaagggaggcgcacagctcgcgaccagctccggttttgcattcaacccgacaagcgccgttattgcgggaacaggcgatattacggccagaggtgacagaaatgcgatcatcagctcttccggaggttcaagttctgaaggttcaagggcatttatcgcggcttcaaacaatgtccatattacgggcagcaaagtctccagaacgattctgtcatcagaaagcattacattggaagaaccatacacggttgccggagggcatcagtccatcaaatggaaactggattcagcgggcggccacggtacgttcgccggagctgtcacctcttccttgtcagggtacggagaatattttgaaagtgtaaccggccagacaattcccgccgggacgatcgtcacagtgaaaggcgaaaaaattgaaccggctcacgtcggtgattacatgctcggcgtcatttcagaaacagccgcttttatctcaggagccgcaagcttcggatggcaaagccgctttttgacaaatgagttcggcggtttcatatacgaaaatgtgactgacgaagaaacaggagaaacggtacgcgtgccgaaacaaaacccggactgcagtccggctcttgaagctgactatgaagcacgcgcggccagagacgaatggcacattgtcggactcaacggccggcattacgtacgggtcgacagtacggtcagcccgggagattatatcacggcccataacggaatcgggactaaagccgcggaaggctggaaggtattgaaactgacagccttatacagttcggaaaaagggtacggcattgcaattgcggttatcaaatagggtctcaatatcaggatcatctcctctcttttctatcgggcgggtatgatcctgttttttataccgaatgagatgcctctttttcagcataccgtttcatttgtccaagccatccatgctttctgtcatagaatactaccgtcagatgaaaaaaggaggaatatgagtatggatatgggtatggatatggaaatggatatggaaatggatatggacatggatatgaacggacattatgatcaccacccaaagcagcctaaacaaaaaaagaagaaacaagataaaaagcatcttgattatgattacatcgttgtttataaaagaaaatgcaaaaaatgtaaaaaatgctgctgacttgacatatcaacactttttacacccggtaaactccgggtgtttttcttattatggcgtttctccgggctattttcacccaaaatccggtcatcctatcataatacataaaaagactctattattttcttcccttttcgcctaattaaaagtatttcatttacagaaaacaacacaaatagaatgacatgacttttgagaaaatctactctttgcttggtcaatttttctgcgataccatgaatttgcaacattttttaaaaatttcctcaggaggtcatagccatgaaaatcgccagaacggtagtcggatcatgcttagctttatctctaacaattcctttcatagccagtacctcagcagccagtcagcctgaacacgtaaacgcgcctcacgtttcacccgttgcaaatccgttagaaagtaaattatcccaaacagcagaccaaaacgtaaaagcagcaggtgttgatgccgggctgaacgtaaacatagatgttctaggaatctcagatcgcattgctgaagcggttaagtcagatcaaaaccgaaccggctgggtaaaaaatgttatggaaacaacattttacgcatcaggacagaagtacaacgtcatggtgttcaatttaaatcaagaatatgaagagcgctttaacggcgttcaattttacggatcagccgtttatgacggtattacttacggaatctgggtcttcgaagacgggtccttcgataacaaaggagacgggggctggatcaattgggctttcagagggtggttcgatcgtgataatcagcatattgaattccacagaccttaatacggagaaaacttgcggcagcgcccgcaagtttttttaattggactgcacatttttcaccgttataacgactatacttgaagtgcgggctccgaacgcagccccggtaaagtctttcaaagtgagggtatgccatgccaaagtctttaaaaataatgttgtggagcatattggtgttcatcatcttgttagtgattatcggaatcgtttcttacaatcaaactccgtctgcagaaagcgcagcaaaaaaatgctttatggcttcgaatcaattttaaagttctgcaataagtcttcaccggctttttaaaccacagaacacctgacaaaacgacgaattttcaatttattcgttaacgatctctttcagtatagaatatacacgtgtattatggggcagtccgttttgatacatatatcttctcaaaattccttcagattgaaaccccgcctttatcagtaattgatgagacgctgcattctcaatgaaaacaacagcgcctatacgatgcagcccaagcttttcaaacccaaaagaaagaacattctccaacgcttcaaaagcatagccattcctccaataattcggatgaatctcataaccgacctccgcccgcttatgcttgggcacccaagagttaaaaccaatagttccgattattcccttcgcatctttcctctcgattccccatcacattcccttttttcatgctactgctcttgaaaccaaccaatcatttcttcagcctgttccgttgaatcaaaaggttccaatcctaatagcatgttacattttcattttttaaaaaacaagccacctgcgcattctcttcgcaacttctcaatgtatgagcctacccgtctctattacaggaagcagtacgatgcctccttttactcattttaacggatggtcatgtaaaggaaatatagactaaaaaaccttttttcaaaaagtaaactagcatccctatcaaactttacatttcggcataatatgtattaatcctctttaggaggtgagattatatgggattctcaggtggttatggtagctcctttgcgttaatcgtggtgctattcattttattaatcatcgttggggcttctttcctcggcggttattaagaatcctcttacctccgcatccatgtcagcagcacctccatgatcgtacggcgccataaatgaaatgtttatggcgctctgctgtttttccccttttcattcacacattaaaactaaaaagatcggccgatgtatcaacatgcagccgatcagtaattcatagattattgtgtaaggtttacatcgatgacgttatagaaggcattggaagtatccgcaacgtcccatacccctaaaatgacatgatacccgcttcgatcagtcggcacaaaaatcttatgagtcagattcgtatctgccttggaaccgtcgtggtttaccgttccgattaattcgaattcatctcttgacaaaggtttattcggattccaatttttcttggtgatataatagtgccactttgatgtcgcatgaggggccgtgtagtaccaagtaaaggtgttaaaaccgccgcggatgttttgttttacccaataatctgcagtctgcttgtctaaaccgaagtcaatttgtcccgatcctccatttgcagacgcaattcttccatcaggcggtcctgcagccggaaatcctttcggcccttctacagactgaggattatcaatgacggagccatatttctgcgcagcggccgtccagcccaatgtttgtttctctaatgctcccatgtacgctctgctgacgggctcttttatatacccgtgcgcagatgcatcacttgaatagaaagcgcctccaataccaagagtaacagttaaaactgcagctttgactaaacccttcattactgcatcatcctccctcttttgttaataaaaacctttcagtgtatacacttcacgatagaggatgaaatgaccttccttttcttgataggaaaaagcaatgaggttcgcgctttcccctttgttttttataatcataaagaaaaagccgggccgattctgttgtcgaatccgcgattgaccggcccgccccttttgctcagaacttcattcgctggatttgccggtttcttttcggataaccggtgctacttccgctgctaatcgttcgatgttttccgcggctttttcaaacggcatacctcctatatcgatttgcgcgagaaatcgctgatgtccgaataactcgtattgatgcatgattttttcaatgatctgctgtgagcttcccacaaataaagctgtttcttttccggacgcccgctcaaaatctcccttcgttaaagtctcatcgatcccgtgatatgaatgaacgtgagaccagtaatttgaatgatacggataaaattcttgtattgcctgttcattcgtttttgaaatgaacatatgtccggttaccgcaaccttcacatgttccggaggatgaccggctttagaagccgcttcccggtatttgtcaacaagcggcttagatgacatcggatcaccgctcagtacagctaatgccaaacccgcgcctgcacgcccggcccgttctgcgctttccggagtccccgaaacacctaaccatagcggaatgcttccgcgaaaaggccgaggagaaatttctgcctcgcgcagcggcggccggtaacgtcctttccaggtaaccgattcttccccggaatttaattttaaaaaaaggtcaatgtgttcttcaaacagttctttataatggcctacgtcataaccgaaaagaggaaacgagtctaaaaatgcgccccgtcccgcaatgatttccgcccggccgtctgaaatcagatcaagcgttgcaaaatcctcaaataaacggacgggatcagcggtggataatacagtcgtggcactggtcagcttaatattttcagtgatctgtgaaatcgctgataagatggccggcggcgaagataccgcataatcaagacgatgatgctcgcctacaccgaatacatcaagtcctgcgtcgtcagccagtttcgccagcttcatcaattcatctatccgctgctttgcgctgactgttttccctgtcagaggatcgggatataattctgcaaatgaataaattccaatttccatacaatcacggtgttcagccctcacatttctctcctcctgcactgtgtaaaaaagcttttatgttattctattcagccattttacaaataggaattcgttcaaaataaatacagaagcttaacatgcagaaggtcggtatgagaggaaaaaaagtttctggcgcccttcaattctgcccattacactcatgcagcccgactaggcaagaacaaagccgccacaaacggattcgaattcatgtgttcattttcagtccgattcaatccaatcatgatattgatcataaagctttcgtattcttccggcatcaagagcaatgacttcaccccctctgtcatcatacagaaagaaaataatatcttttgtcatattcacaaaaaaaacatcaggatacccaacggaacagcccccgaaccttggcttcagcggaaaatcttcgtggacggctgccttaagtaattgggggatacgcagatctttccgtttacataataaagaaaactgctgcatttcatattcttcttcgaacggggatggacaggtcttcacttgaatccgatataaatcatccttacacttcagaaacggctgataaacctttaattttctcgcgtgatgaccttgagatttgtgcttatacacgttggcaacaaggaacatgtcatcgctattgttcaaacagctcattgaaaagtgcggcagtttgatgatgaacaaactgaaaatactcaagattcaaagcaccgatttcattaaattgatatattgccgccgagagaaaaatgaattcccacgtcccattgatgataaatgccgggcactaattttaaagtcggaaacctttccttcagataatcatttattttcattcaaacatctcacttccttttcccgctccagaagcagaagaagccgaaaacattccgcttatttctttttcacccttgtaatattattccgattggaatacaatgaaataaaacactgtgaaccccatttatcagggtggatgctggtcacattcatcctgatcctttcttttacacaagatcgccccaactttgaacccctccgtttccaaccttattcattgatattacatatatttcaatggtattattttcttatacataagcatcaagaggtgtcagctttgaataacatcagaagattaagagcatattttcagtctcaccgaaaaataagtctggctgcagacttgcttacggctgtattgcttatctcattatccattcttttttacggacgccagccgggagctttttatggtttctttatgtatattttagtaagtaattttatcggctccaatgcctcttttatcgacttcagcacatcgaggaaaaacaaacaaaaataaaggctctgcgtcaaaaagagggttataccgccctctttttattctttcagtcataccaatgcgttctttttaggttgaatttttctgaataggactcatgatcggttttccatgctgcttcaacagtgatttcatgaccgatcacttcattttccggcatatattcaaacgtttgaatatggtcttctcccgttccgccgccttctaatttctctccggtgtattctgaaagatgatagtctttatcttcaccatatttccggccgtcaacaaataatgttaatctcttaatcaccgtgttcttttcattcactttattacctctgtaatacaaattcaagaaatagttagggccgatagaggtcttgcctgatttttcgattgacgcttcccacgtcttgctttggctatagccgatatatttaactttttctcctgaaattaaagaaaacagtgcaaatccggctgctattatgagaacagtgataataaccagcaatgttttaatgactttacgttttttcatgacatcccgcctttatcatttagaacgtatgaatattagaattgttacatttaatttgaaagaataataaaaagggattctaatcccaggaataaaaaaatactaagaagatcatattccccttagcttcacatcccagattgccatgcaataatgataaaagtcgtccaaaaagttgtgactaaaataagcataacggttacaatcattaaaatgagacaacttattgttagaattgagtctttgtttttgttaagaatcagagtaaccattgatcctgcagcaaatagatacgacaaaaccgcaccgacccaataccacagcatagagtcattgctccagtaagccattgactgcatataaatactgaatataaatcctgacaatgctaatagaaacgaaactaaatttgatttcaagttagcgttcctttcttcataagttttatttttaggaactgtcatacatctgataacaccttttatgcgatatgcttcgccgctttgtctgcatattttaattcctatttcgtatttaaatatgtttactaaaacagaaatcatataaagttcacctgaaacgccgatttaaaattaaatagatgttttataagcgttaattgcttgatttctcaaaacttgtttgatgatatccagcaattgattatcggtttcagtttcagcccgtccacccgttattctggatttccagtaatcaaactggtgatttcattctgaactgcttttaaggttttgattatcaaccacttttccattctcaagcgcatctttaaattcatcaaaatgaattgaacattgctgattcgaattacttcctgcaccttctgtcgctaaactgcaaaatgtccatcacaatcatcctctctctaattttacaacattgctataatgattttcatgtttttcccaaccttcaagctgaatctttttgatcgttactaggtaacctaatgaagtatttaacttaaatacaaaaaaacctgcttctagcaaggttttttcggtaaaggagaggttatctccccacaaattctattaactatgtttttgttttaaccattctttctttagcaatgcgtattggtaagtgttttcatatttaggtgttccatcctcgtgtgcagtaaatgaaataaattcaagaaaataaccttctttacgcattcctaatctttcacatagtttttgtgacctgtagttatcatcttcaacatatgcataaagccttcttgcttctttttgcataaagagatactcaaagaaagccttcgcactttcacttgcgtatcccttcccttcaaaacgggcattgaaattccagcaaacagaataggtatctggctcttcttttaaataaaatagttctccgactagatcattactgtcttttaaacaaactgcaatataagagtcatctcggcttcttttttgaacgtttacggcagcttcttctaacgtagacattctgtcatcaagaaagcaattcactctcggatgtgccgaatattccaacagaccttgcgaatctctctcggtaaagtttcttaaaattaagcgatgggtttcaattttttgcatttgcagtctcctgtttcattgttatcgatcattgaaaagaacttcttcgtttgttgaagaacttgtctcaatctatttttactataatgatggatgctatcatctttgtcaaaaacaataattttcatttgccgccgcgatgtaaagtactgaacaattttcgtaaaaaaccctaagtatcgaatatagaaacgagcaatagtaattaaaacaaagttaagccattaaaagcttattgagtattttttcaaacttattcactttcatcatctcatgagtgagaaatgtcccgttataaaacacgctgaaagtcgtccaaactgccggggttttttgcgccatatcttttgacgttattcgccgggcctgaaaatgaagtcctttcttttcaatcagttccttaaaatcctttaacaatccgactgcaaacgggcattgagctgtataaaatattgtgattccctcatcattaacggaattacttttcacctgttttttaaatacaggaggatgtgcatgttcattccacgtcagtgacaccaactgaaaatagggttctgcttcatcttgcacagcaaatcccatatgttcaaagaaatgcttatcacttaaataagggagttttttcttccccactatatgaactatcccatccataccgcgggattttgcatctgacacacatttttctaacaagtgtttcgcatgtccgttattcttatatttacctgagacccaaagacaattaataaacataaaattaggtgcgcttaccggaacccacgcttcttctgcaggtaaatattcaataaaaacttttgcccgttcgtttaggcgatagaacaccaagccatcaatcattcgatctttgagccagctcttcttttcatttaccgcatcctcatattgtttcgtacctaatgcacagcaaatatgattgtcatcaatattgtccctagtcaactcaatgtattccatttttcctcacccgctttcttttgggaacatcagctttacttgcagtgaacattgtaatttctcagaaatatagagtcccagaaccaatatatgaacgcagcaacaaagctcattatgtaataaatgaaacttctgaaaactgtgaaatcaattgacggattatctatgtgccagaacaagaacacggctaaaaaagcgactgctgtataaatgaaaagatgaaccaaactaaaccttttaggcttctttcttagccatagttgcacaggaacagcaaacaaaaagtaagtaatcaatgcgtaaaaagcaatgataactacagtaaccaatgcaattggcacaaaacccgagtatacaaacatatatagcccgaagatcaaaccatacgacaaacttgaaaaagccaatgtgtaagtatagctttgccttttgctccaagtcgccgctcccatatagttcacctgctttatataaaaatacatttctcatttttttcctattgtttaaaatcagtatatatccatcactttaaaagatctatgttttttgatctttttttgcagatcagcaattctatctgcaaattttatatcattaaaaaggtcaaggaaataccttgactgtgtatcgctcaccaatctgcatccggctctttttgtgatctttaagaaatgatccctgtttgcatcaccattcaccttatcagcgctcaagttcaaatgattatccgtgaaattcttttcattaagggaaaaatcatatcctgccagtgtaattctctgcagtgcaagtcaaatatcgacagaaagattatgtccacaaattcaaagcattctgtgcatttggagacgacaatcccccatttaaacaccattcggatgacgacaaatcatccaaaggatctttcctgcatagctcccacaatttttgcagaaacacttgtccgtaaaataatgtaagggttttcaaaacaagagcgatgtgctaaattgtaagataagtaacaattttctgccaataataaaaaggggtgtatgacgtgaaagcagtagtagcaacgaaagacaaaagtatagcgatcgtacaaaaagaattacgtcctttgcgacatggtgaagccaaagttaagatggaatactgtggtgtatgtcatactgacttacatgttaaaaatgctgatttcggggatgttacaggcatcacattaggtcatgagggaataggcattgtaactgagattggtgaaggcgtaacaagcctgaaaaagggagaccgcgtctctattgcctggatgtttgaaagctgcggccgctgcgaatattgcttaactggccgtgaaactttgtgccgtgatgtaaaaaatgccggctatacagttgacggtgcaatggctgaagaagcaatcgtagcggttgattatgcaataaaggtgccggaaaatttagaccctgcagcagcaagcagcattacttgtgcaggtgtaacaacttataaagccgttaaagtcagtgaaattaagccaggtcaatggatcggtgtatttggagtcggcggtttaggcaacttggctgttcaatatgcaaaaaatgtctttaacgctaaagtaattgctttcgacattagcgatgaaaaattgaattttgctaagagcttaggcgctgatgcggttgtaaacagtttaaacgaagaccccgtcgctaaagcaaaagaagtgactaacgatttagggcttgatgctgtggtcatcacggctgtctctaaaacccctttcaatcaagcgattgatgttgtaaaagcaggagctcgcgtagtcgccgtcggtttaccggtggacaaaatggatttagatattccccgtctcgtgttagatggaattcaggtagtaggttcattagtaggtaccagagaagacctgaaggaagcttttcaatttgctgcagacggtaaagttgtacctaaagtgacaaaacgcccgattgaagatgtgaatgatatttttgaaaaaatggagcaaggcaaagtgaccggccgcatggttatcgattttacttcctaatcattaaggctgccgggaatgatacggcagcctttgatctctattcttgctcagcgccccactcagactgaatgagactttgtcatttagttcagaaaagaagctctacagaccattcagcggttattcattttgcaagtactctctgaactaaccctgataccaatataatgcaaggtcattcattgccgaagcgtagccctgctgtcttaacatagttgttatgctgccccgatgataagttccgtgattggcaacatggaataaaatttctgagtaagcagtttctctgtaacctaaccaaggattatttaagttcattttttgttctaaatctgtttggctattcatccattcttcaaactgtgaagccagttcttcataagacgccgcaaattcatctgcagaatataaatgagccctttctgcataagccgcagaaccttccactgcttcctgcatgtctattcctttaagcacttgcagccacacagcatccaccgcgcagatgtgactgaacgtaatttgaggcctttttcgaacttctctaatttaatctacataatagttcactgaatctctcaacaattttaaataaaaatcttctttttatagagatgttcgttctatcgacatccttgtgataaatatggtaaaattcataaaaataagggagtgttgttacatatgagtcttatcattttagcatccatgcttttatggggtgcagtgatccacgagctaaacaaaccttcaaaaaaacaaagtaaacgaaaaatgatccctttggtatccctcagttctttatctactttaatcatcacaatttcgcttttttctaatttaattggttgatatttgttatgaggaaacccgccagaggttcctcataacactaaaaacctactcactgcactttttacagcagaccttatcagagtgtttgcttaacactttgtccattctccccacaggcatcttcttctcactcggaagtgtaagataagctgttatctcatcccctgattttaatgtttttccgcagatagagcattttaactcagtattaaagaaattttttaatcccattcagaagcctccttatttacctttataaagtaatacgttaatgctttataaaagtttcaggttaaagaaatactccttgcctgggaatatacttcgtttcaattgatccgcagccgccccggtcatcgttgtctacaaatataccccacccaataggccgctttttcattttaagtgaaatcatcttcatgctttgaccagtttactgcagtgtatagattgtaaatttgtgacatttatttgtcctcttttaattttttcttcttctctcaatttgaaaaagaaggaattattttataaatattgtaaatttatagctgtatcacattcactattaagaggagcgatacgaatgaaaaagaaaattattgccggcgctcttgcttttgggttaattccattaatggggactgcagatgtttctgcaaaatccagataaagttatgaaacctgctggttggtcatgtgacgctccgtatattgcgtgtcagcctttttctggcggtaccggtaaggtttcattcaactatcaaggcagctctccaggaaaaatcagagtttttgttgcgaatgacggcagcaaatctttcaaattcaccattaattatcctaatgggaatacactcttatcctctacgacattaaatgcggggaaaacgttcattcaagaattcagcgttaaccaaaaaggagaatacatcctgaaatatgatagcggcaccggtgatagtgtcgatggtttctttagatctgttgagatctaaattccgttaggaaagtcggcagttttgccgactttcttttacaagcattctgcaggaataaacgtaaagtttcgaataaacatatgacctttttgaaacggaaactttatctgcaccacaaacccgcaagcagcctccttgtatcgtaccttccgtccctttgtgatttgttttgatttgtcgtatactgcgcttgcccgggaaatgatgaatattttcgttaactatcatttccctgtacctcttcgtatgtggctctgcatgatgaagtagcttcatggctcaccactttcatacacagtttcattgcatgtttagccatatccctcctctttaaacagcaaaccgtccaatccatttctctctttcagttaactttccattattttatattcttagaagctcttcattttagacataacatccattttttcttatttagacttaaatctatgtcgaaatttatcgtccggcatattatgtactatcctaacaacaggaggtggcaataatatggggaactacggtggaaattacggtggaagttctttcgtattgatcgttgtgctgttcattttgttaatcattgtaggtgctgcattccttttctagcacattgacgatttatattcgtctcccaaacattgcatcccttagttcggacagacgccataagaagttttatggcgtttttactttaaaaaaatcaattctaagataaccattttttatttttactctggtaagcgggagcgtttcctcccctgcctgcgccaatattgccgctatgaagaatgaggcgaacaatccaattcggaataaaaacttgttcatgaacaaaacttctaaatagttgttaaaaaactaaggcgtttttaattcatcaggattacagatgttgtgaacttaaaaaggatattactcaccccctttataaaattgtcattcgttagatttagtcactgaatcttatttgtttggtatcttagcggccttccacactcatttaaaaagggtccgcaaaatactaagtcattttcacataaaaaaaaccggattcctcatctaagaggttccggtcttttttagttaaaatgcgggaaatatctggtgacgtgctgcacacccccgctattataatatttcaatagagccttctgttccatgaacgcgtattcgctgcccatcttttatcaattgggttgcattttcaactccgacaactgcaggtaagccgtattcacgcgcgataaccgctccatgggtcatcagtccgccaacttcagtgaccaggccttttatggatacaaacaatggtgtccagctgggatcagtataaggggtaactaatatatccccatcttccaaatcagcatcttccatgtttaaaataacccgtgccctcccctctatgactcccgaggaaacgggcagccctgcaatcgctccggccgggagattttctcgtttgtactcgcctgtaacgatttcaccgtcagatgtgataacacgcggcggagatagtttttcatatacttggtactcgccttttcgtgtgctgatgatttggtaatccaatttatgtgtgcgtacgacttcctgaagttcttcaaaagtgagatagtatatgtcctctttttcatgaataacgcccgcttctgcgagttgttcggcttctttcagtaaagcctgcttataaacgaagtagcggctgatcatgccgtattttggatattctctgaacccgctgaagttccggatgatgcggatcattcgtttggtttctttggctttttgttcaccatccggtaattgcttcaatcggtctaataactcttgttctttcttcaacgcctcctgccgcccttgctcaaatttccgctggctggcatttggctcaaagtttttgagattattaagaatcatagggacaagtgcagttggtttttcgctccatcgagttcttgtcatatcaatttctccggcacatcgcattccgtacttgctgagataagcatagatagcgtcacgggtttcccgcccgccttcaaacgtcaccaccccatccaaaaagtgatcatcttttacattctctaaataggcaattacttctggataagggcggatcacatcggcgacgtccaaaagcgcaagccccatttccgaggtaatattatggggtacagattgagaaagcgtatctgctgcgtttttttcacctaaccactcgttcattttttcgttaatccatgatgaagcatccattgcagttcgaatcaacaccgaactttttgggttaaatagaatcttctttaattccttgatatcttccaaaataaaacgaaataaatcatatcctgatttcgtctgaatattttgttttaactcttctatcgatgcttgactgctcttaatcaaatcagaaacaatggccggatcgttctcagcttgatccggcatatctgcattgcctttgccgggaatcggtgccgttttatcaggtatcggcttaatgaaatcatctcgctctattatggtcataagtgcgtcttttaagagcggatcgtgctgccccatgccttttaagaaaacttctctgacattaggagatgccagttgatgtgtgacatcaacgaatagccttccgccggctttacgcatgggtgcagcagtcgtcaacagaaaaaatgacaatccaaggggttttatgggatccgtcatcatttgctgatgaccaacagagatatagacgtgattttcttgatcgttcgcttcaggaacggggtataacgttgtgatcgggcgactttggacaatataaaaagtatcgcggtccaaacaccattcgatatcttgcggctggccgaaatgagcttcgatctgtctcccgatacgtgccagctgtaaaatttgttcatcagtcagtgtttgaatcttttgctgatcaagagcgatctcctgtgtttccgttccgccttcttttcgtccatagatagccaattttttgggttctattctcttatcgacgatttgcccgtcctgtactttataacaatcggcagagactaagccggagacaagtgcttcaccaagtccaaaaccggcatcgatggacagcagctttcggtttccggtcatcggatcagcggtaaataaaatccccgaagcctgagggaacaccatcctttgaatgataacggataaataaacttggctgtgatcaaacccattttgcatacggtaaatgaccgcgcgatctgtaaatagggacgcccaacatttactgatatgctgcaagatcgcatcgacgccggtaatatttaaataggtgtcttgttgaccggcaaaagaagcatgcggtaaatcctcagctgtcgcactggaacgtacggcataggcatgttcgtcgccgaactgggagagatggcaagcaactgctttgactacatctgaaggaatttctgcttccataatggtttgccggatttttttgctgactacaccaatttgatcgcgattctccactttcagcatggtcagttgatccaacagcgcttgtaacgtttcgttttgttcaatggttttttgatatcctgcggttgtgacacaaaatccttccggtacttgtattccttgaatttttgataattcccctaaatgtaacccttttcctccaacgagcaaaggctgtgttttttcaatttcgtgaatgccgagaaccaaagaactcattctatatctccccttcaaaaaaatttgacaagagcttttcagcatgatataatcataatataagatggataactatgaattttcacacagaaagcgcgcgtgttctgattatatcaccgtgtctgtttttgtgcaatataaaaagaacctggccaatttggcgaggttctttcttcatttgtgtctaaagctctttaaagctgtattgagatcttttgtgtgaacgtaaatgttcttatacaactcgaatagtgttttatatttttgaacatttttttcttttggataaaatgcagctgcttcatgaatgaactgctctgcgcattcttcaagagagtcaaaccacccgcttccgaaggcagctaacatcgcagctcccatggcgggaccttgttcattctctaacttaaccaccctcgtattgaaaatatcagcctgcatttgaagccacgtttcatttttagctcccccgccaatagagacaaccgtatcaactgattttcccgcttcacggaatagctcaattgattcatataaagagaatgtgatgccttccattatcgccctcaaaaagtgctctcttttatgggctccgtccattccgatcaagcttccccgaatagatgaatcagcatgcggcgttctttcaccgaccaagtaaggagtgtacagcagtccatttgctcctatcggaacagattccactccccgcaataattgttcaaacgattcgttcggcgcaaacgttcttttaaaccagtccaagctgtaccctgcagcgagcgtgactcccatcgtataaaaagaatccttctttccatgattaaaaaagtgcactttccctttaaagtccctttctttgtcttcttcacaggaaagtatgactcctgacgtcccgatactgcataatgtttttccggaagaaagaataccggctccgacagcaccgcaagcattgtctgctcccccggcgtacacttttgttttttccaacagcccagtctccgccgcaacgctcggaagcagcgatcctacacagtcatgggattcaacaagcggaggacaaatttccgctgaaataccaaattgattgcaaatctcatcgctccactctttgcgggtcatatgtaaaagtaacgttcccgccgcatcggagtattcggtgtgaatggcgccagtcatgcggaatctcacatagtctttcggaagcaaaaaaacagcggttttgtgaaaaagttcaggctcatgttccttcacccataacattttaggtaatgtaaacccttcaaggacacggttttttgtgatatcaagcagatgatcgccaaatgtctcggtaatcctgctacattgaggcgtcgttctggtatcattccaaagaatcgcatgacgcagcacccgccgatcttgatcaagcagtactaacccatgcatttgtcctgaatagctaatcccctcaatatccccggcttgaacgttggatatcgaaaccaattcagccaatgcttcaattgtttgctgcacccagtcttcaggattttgctcattatatcccgccttctcttggatgagcgggtaacttttggacgtttctgcacaaaccttgccgttttgattgactaaaatggttttaacggcactcgttccaaggtctattccaatgacatacttcattttttcactccttcctctctaaatagatccccattggaatggcccgccataacagtaatttcatgacgggccattccgggaacttggctgcctgcatctttttacagcgggatctggagcttcttttttcatttgttatacctgtaaaatgtattgatttaatatcgcttttaaccgctcctgtctccctgattcgtttttaattggctgattgtttagcgcatattgctcaagtgtcttaaaatcagctcttccttctgcaatttcaagaccaatcccttcagtaaagctgcggtaacggtgttgaatcacatcttcaaacacacgatcttcgattaatttgtgggcggctttcaaccctcttgcaaatgtatccatccctgcaacatgggcatatagtaaatcatcaggctcaaaagaagatctcctgacctttgcgtcaaagtttaatcctccgcttccaagaccgccattttgcagaatttcgtacatggctaatgtcgcagaatataaatctgtcggaaattcatctgtgtcccagcctaaaagcggatcaccctgattcgcgtcaacagagccaagaaggccatgcactctcgccatgcgtaattcatgttcgaatgtatgcccggctaatgtggcatgattggcttcgagatttaatttaaaatgattgtctaagccatattgctttaaaaaggcaatggttgttgctgcgtcagtatcatattgatgggtggtcggctcttttggttttggttcaatcaaaaactgccctgtatacccgatttccttcgcataatccactgccatatgcataaatctggccatattatcaagctcaaattttaaatcggtatttaacaaagtttcgtacccttcacgtccgccccaaaatacatagttctcggcgccaagctcttttgctgtttctaatcctttttttacttgggctgcggcatacgcaaatacatctgcgttacaagaagtcgccgcaccatggacgaaacggggattcgtaaacatatttgcagtattccataataacttaacgccgctggttctcatgtagtcttttatcatgtccacgattatatccagattttgatttgtctcttttaacgtacttccttccggtgcgatatcccggtcatgaaaagcaaaaaatggcgcatccagtttttcaaacagctcaaacgctgcatctaccctcgctctcgccagatccatgcctttatagtgatcccacggtctctgcatcgtagctgcgccaaaaatgtctgtgccgtcagcggtaaatgtatgccaataggcaatagaaaatcgcaaatgctctttcatcgtttttccgccaattacttcttgagaattatagtatttaaatgctaaaggattcgtggattctttcccttcgtaaatcactttgtttgcgctttcaaaatagttgactgaaccggaatgagagtgagccatgtgtgatttcccccttaaaaataaattctaaacatgatcattcaaatacagatgcttttatgtcatgttgcacattagtttgttgcccaaacaaactaacttattttcatcttatataacctcatcagtattttcaatattttttttagttttttacgaacacattagatataataaaggttggattcgctatgtactgcgttttgcacgataacacagaacgttcaacttaatttaaagattatacaaatggagtggatgaagtggatatcgctgatcaagcctttgtcaagaaagttaaccaaaagttattactaaatgaaatacttaagaattctcctatttcaagagcaaaattatccgaaatgaccggattaaataaatcaactgtttcgtcacaggtaaacacattaatgaaagaaaacctcgtatttgaaataggtcagggacaatcaagcggcggcagaagacccgtcatgcttgtttttaataaaaaagcaggatactccgtaggaatagatgttggcgtggattatgttaatggcattttaacagatcttgaagggacgatcgtccttgatcaacaccatcatttggaatgcaattctccagaaatcactaaagatattttaattgagatgattcatcactttattgcaaatatgccgcaatctccatacggtcttattggtatagggatatgcgcgcccgggctgattgacaaaaatcaaaaaattgttttcgctccgaactccaactggagagatattgacttaaaatctttcatccaaaagaagttcactgtgcccgtttttattgaaaatgaggcaaatgccggcgcatatggagaaaaagtatttggtgctgcaaaaaatcacgataacattatttatgcaagtatcggtacagggatagggatcggcgttatgatcaacaatcatttatatagaggggttggcggattctctggagaaatgggacatatgacaatagactttaagggtcctaaatgcagctgcggaaaccgaggctgctgggaattgtatgcttcagagaaggctttagtaacatctcttcagacgaaagagaaaaaagtgtccagccaagatatcatagacttcgcccatctgaatgatgttggaactttacaggcattacagaattttggtttctatttaggaataggcctgaccaatattttaaatacatttaatccgcaagccatcattttaagaaacagcatcattgaatcgcatcctatggttttacattcaattaaaagtgaagtgtcatccagggtttattcccagctagacaatagctatgaattattaccatctatcttaggaaaaaatgcccctgctctaggaatgtcctccattgttattgatcattttctcgacatggttcataactgaaatgtacatacttctatgttttacgctcatctttaaagatgggtttttttattctaggagtatttctgaataaatactgacataggcaccttctaatatgaaaaaggagttctaaaatagaaatctcctttttcatgtgctaattatttttctttataacgaaaatatctgaagtcggccggaatatgatgaccgctcgtatcttggcactgcatcccaacaaaagctcctgtaaagaatcctcctccgcggatgtaatcatctgataattttttcgattccaatgcaatgtcgattttgtgccaatcttctttgttaaatgaatacaaataataatatttttcgttttcaatattcacttttaaatagacatacttgacttcacgaggaatcacaattttattttttaatggctgtgaaaaagaaaagttatcacatatcgttaattcaagaatacggccaagttcttcatcatacgtgacttgaagagccgtccagttctctgtattgtaatagttcaccaaaccagcggcttgctgaaaattttccggataaaacgcaacagccgtttccgcttcaaaatggagactttgccagcgtctggctacaaatgcctgagtaaatgtcgaagttaaggattcatggccgtataatcgtaaatgatttggcacttgagttaatgatcctaatttctccgtaaacggaattcttaacgtttgaaaattaatatttaatgttgcatcctcaaattcatcaacttccggatacgtgtcttcaaacattgtttctggtatagaaggcgcatccacttccaagctcccttcttttccgccttctacataaggccagccatctttccaatagagcttttgaatagctgtttctctgcccagaggacaatatcctctctgctgaaaaattgaatcatcgtccggatgaatgggacgtcccgttaaatgagctaaataccactcacctgtatgtgtttgtacaatggatgcatgtccgcatttttgcagcggattttccggcacatgccatgacgttaagattggattatcaggatgaacttcatatgggccttcaatatttgcagaacgggcaattgtagcagcatgttcgaaccgcgttcctccttctgcggttaataaataataatagttcccgatacggtaaaggtgcggcgcttctgtcagctttctttcagttcctttaaatatcactttcggtttgccgattaatttttgctccttatcagaatattcctgcgtgacaatgcctccaaaggagtgccgatcaatacgctgatcccataacatatttaataaatattttttcccatccgtatcatggaacaaagaagcatcaaatcccgagctgtttaatgtgatcggctccccccactcaccagtaatcgtgtcacaagtcactaaataattgtgacaatctttccaggcgccatctacgaccttaacatccgtatagatcagccaaaactttccgtcgctgtaacttaaacatggcgcccagaccccgcctgaattaggatttcctttcatgtctaattgcgaaactctctgtaatggatgtgcaactaagtgccaattgactaaatcttttgagtggtgtatctggactcccggaaaccactcaaatgtagatacagcgatataataatcctctccaaccctgcaaatactcggatcggggttgaatcctttaagtactggattgataatcttcattttgaactcctcctcagctattttctgttgactcatcatgttttaagctttgaaatcgtcaatatgatccaaataaactttgtctctattctctaattctcgaaccatgcttttatattttttctcatctaagttatagaaattaatatcaatcatggccagaaccagtaagaacacgggaataatggttgctgtaattaaaattcccgttaatgccgccggggtttgtgcctgatttgccacatatccaaactgatcaagaaccagacccggcacaacccctcccaaggccatgccgaatttaaagaaaaacccgataatagcgtatatgagaccgcccattcttttcccggtcttatactctccatattctattgtttcaggaataagcgcccacatatatcccccggcagtgagacttcctgcagcggccagcaatcgaaaggaaagtatcaggaatacattacttggcggaacaaacagtaaagctaagaggccgatcatattcagtaataatgcatagtttagtaatttcttcttccctaataattgatgaagctttggaataaacggtaaaatgaccaaagcaggcaaacttcccaacaaaccgtaccacttcactaaatccgctctttctaaattatacgttacgtaatagatgccaaccgaattactgattgaattcactccaaaaataataataaagaaaatacttaatacaactagaggccgattaacacgaaactgctcaaatatatccgaaaatttaattttttcttcggatttttgaagcgtgacacgctcttttgtgcttttaaaacaaaagattaaaaggcacccgcctataactcccataatacccatggttagctgccagccaagagattcgctgccggaattatcgcttaaataagcagccagtaagggaacaaaaaatgcaacgacaagtcccccaagattcgcaaataacatacggacagacgttatactaacaacttcttgattatttctggtcattgcagatgttaacgcgccatatggcacgtttatcattgtgtatgtaagcgataagccgacataggtgatataggcatatattaatttccccatatccgaaaaatccggggttgtaaaacagagtattgccaatatgacaaagggaaaagctccgaataaaagatacggtctgaagcggccaaacctgctatttgttctgtcaactattgttccgataaaaggatcagcgagagcgtcgatgattctaaccactaaaaacatcgtaccggctgttgctgccgataaaccaaaaacatctgtatagaagaacaaaagatacgtagacactgttgcataaattaaattacaagcaaaatctccagacgcatatccaactttttcaaccatgctgatcctctttacattttcactgagcatgatttctccccttttcgatcctttacataaggaacatgatgaatggtataacatttctttaaaattatcggccagtgagcggcatataaaagcgctttcaaaaaatgacagcggtttactttcacagagcattttcatcatccaaatggtgatcagatagcagtgaacaggataaaagcttggctttcgctttttatatacctccaattaaatcgagcctcttatccccctcccatttaagacctttacatgatggacaattaaagtggttttattagtttgttgaccgaacaaactaacttgatttcatattataaaatcttttctgctttttcaactcttttttcagagaatttaaaaccgaccaaaggacataccatgtcgtaattgccgactgcttcgacagacgttaagtaaaaacccctgtgtcacctgactgacttattaaatgataagcacttccatcatcttgtgtttagaaaaacttattaagaaacatgcactagaaaaaatgcgaatcatatataagtgatatcccgtttaattggttgaggaggatatgatgaaacctatgctgccttttgaaaaatattttggggatttagaactggtttatgcattttatggagctatgcctactggtgttactgtttcagaaactggtcgtattttcatttgttttccgaaatggggagacgatgttaaatttacggtggcggagataattggggataaattgcagccttatcctgatttacaaaccaatttggttaaccctgagaatatcaaaatgactttcatcagtgtccaaagtgtagttactgatggaagaggaacactttgggtactagatacggcggcacccaatttttctaaaccaattaaaggcggggcaaaattagtcgctgttgatttaaaaaccaatacaatcagaagagtttatacctttacagaagatgttgttcttccaacaacttacctgaatgatgtccgatttgattttcgtgttggaactgcaggttatgcctatataacggattcttcttccaaaggaccaggagctattatcgtcgtggatttagaaaccggaaacgcatttagacggttaaatggagagcaaatccaacttcaccggattcctattttataccgaaaatagaaggcaaaattttgatgaatcgtaacagggatggttcaacttccccgtttaggctggcatccgacggtattgcgatttctcctgacggaaaggtattatttttttgtccactgaccagccgtcatctgttctcgatctcaacagaagccctgagagatagaaatatacaggacatggatttactttatcatgtggcgtattggggagaaaaaggcgcgtctgatggaatgattacagatgcaaaaggagccatttatgccggagattatgagaacaatagtattcgaaagatgctgccgaatggcacaacggaaaccatcgcacatgatccgagaattttatggccggatactttttcgattggtccggatggatacttatacgtcatcgtgaaccaattacatcggcaggctagatttcattatggaaaggacttacgacagaaaccttatagtttacttcgtatcaaaattgatgaatttcctgctcctgctttttgaaaataaaaatggccggttcaattttagaacataattggcttcatttagccttcatcctaaaagaatcaaatttcaaatgaaaatgaaggaaatcatataatatcctcatttaaatataaagggtttattcgagccgtttataacgcactgttgacgtatataagaaaaaaacagacctcccttgagcctcagaacctgaaggaataggtctatcatgaatatcagatgagcaagccctttgatgggcagttttattacagagccggggtgacaccccggtctttttattaagggaaaaacactgtaacccgtctggattttacagtttgccacgcttttcttctttttgaatctggggcaatattgaaatttgtacagggaatatttggacataaaaatataaccatcacttccgacgtgtactcccatatctcagagaaacttgaaaattcgtcagttgattattatgaagaatatatagtcccccccttttctcccccaatttgtcccctgttttgtcgggaatttgtcgcttagttttcgttttacacccaataaaataaataaaaaagagcagaccgaagtctgctcccttcaaaagtttatgatttgtcattatcagatagccttagaaccgtaatactcaataatattaagcctataaacgtgccgtattttccggtatctatatctgtgagtggagctacaatatattcaatcaggaatataataatagctattgagactaatatacgattcatttgacattaccgccttaataattaaccatttctccagggtacaacaacaggggtaccaattatccaattataagaaattccgtactttccattatcggatactttttttatgacatacttaccagtaaacattgcccctgcaattgctccagcatatactgaaatcccaggtatttttttatcaatgctgctatcccggcgatagcccctgctataccgtcagcatcctcaacaatatctaagaattttttaattacacacgaattcatgctcaccttgactataggaattgctaccgaaacaccttgtttccctctacattttgctagagttgatgagatctcacttgattcataggaaatattaactgtagtagaatcgactagtgttcgatggccatcagttaacaaatattgatcaactttaatcgactctttagaggttcctttatctagagttttttgatcaataaaatactgtattccgccatattcgattgtataagatgcttcaccttcagactgacttataacattcattccagaaacattggtttttaccttttcattcatcgatgtcttagcataagaagaaagtgcaaatccgcagactaaactcaatacaagaagcaagcttactatttttgttttcaaattattatccttcctttaaggagactaacatagtcataatgaaaaatacaccatataacgttaaaataggaaatcccacctacacaactgcttactacaaaaaaacactcagattattccgagtgctgtagcaatgcgtaaaatggcacgctgttttatttcataataggtgcccttcttcatgccaagttccatataaatatgaatgtctttcgtttggctggctgctaagtattttttctcaatgatcatgcattcttcatcgttcaggctgttttctaacgccctttccatctgcttaaccttcagttcatttaatgaatgaaacaggctgataccagcgtcaaccgattccttcaaaaatttaaagaaaagtctaagcgtggtttttccacaagttcaattggctgtagctgaaaaagaaaaacgtatggatcatcaaaacaaataaaaaacgagaatacaatatggagtttatcaatagcgatgacataccttttttttacgtgtagcatatgaatgaggattatatctccacaattatggagtaattttttattgtttttttgtgggtgttttgtgggtgatacttgatttatattaagttattaaacttgttaagaaaccaaaaaatcccctgacaccaatagtgccaagggattgagagattaatactgagacatatactgttcgcgctcccacggatgaacctgtgtgcggaacatatcccattcgatttcttttgcttcgatgaagtgttcgaacaggtgctcgccgagcgctgcaaccatgacttcgtttgatttgaattcgtcgagagcttccgccagtgtcgccggaaggtctacgatgccgttttccatgcgctcttctttgctcatgacgtagatgttgcggtcaatcggagccggtgcttcaagtttatttttgattccgtcaaggcctgctgcaagcaatacgcttaacgccagatacgggtttgccgccgggtctacgctgcggacttcaacacgcgtgctgatgccgcgggaagccgggatacggatcagcgggcttctgttttgcgcgctccatgccacgtagcaaggtgcttcatagcccggaacaaggcgtttgtaagagttcactgtcgggtttgtgacagccgtaaagcttgtcgcgtgttttacgataccggcaatgaaatgttttgctgtttcactcagctgaagatcagcgtctttatcaaagaatgcgttaacgctatctttaaagagtgataggttgcagtgcataccggaaccgtttacgccgaacagcggttttggcatgaatgtcgcatgcagaccgtgtttgcgggcgatcgttttgacaaccaatttgaaagtttggatgtcgtcacaagaacggatggcaccggcatatttaaaatcgatttcgtgctggcccggagcaacttcatggtgagatgcttcgatttcaaagcccatttcttcaagctcaagcacgatatcgcggcggcagttttctcccaagtcagtcggagccaggtcgaagtatccgcctttatcattcaattcaagcgtcggttcgcctttttcatctaatttaaacaggaagaattcaggctcaggtccaagattgaaatcgctgaaaccgagttctttcatttctttcagaatccgtttgaggttgttacgcgggtcaccttcgaacggcgtgccgtccggattgtaaatgtcacagatgaagcgtgctactttacctttttcagccgtccatgggaagattacaaatgtgttcagatcaggatataagtacatatcagactcttcgatacggacgaaaccttcgatggaagaaccgtcgaacatgcatttattatcaagtgctttttcaagctggctcacaggaatttccacgtttttaatcgttccgagaatgtctgtgaattgaaggcggatatactttacgttttcctcatttactaattttacgatgtcttctcttgtgtactttgccatttcgtaaaactcctcctctaaaaggtaaatgtatatagcaaaacagttgctaacggattaatgaaagaatcgggacatgtcaccttggcggaaagtatttccccgttggaaacggcctgcctgcatcagttcgtttttcagaagctttctgagttcgtcatcagacagatcgtgcttcatcggtttggcggttttttcggatttttcttccggttcggcagatgccttatccagaatttgtttgatccccgccatattaacgccttgttcaatcagatttttgatttctaacagtttatctacatcatggaatgaaaataatcgtctatttccttcgcttctcgctggaaatatcaatccattttcctcataatatcgaatttgccgggcagaaagttctgttaactgcatgacaatcccaattggaaataaaggcattgagcggcgaatgttatcactcatctcaatttcctccttttcttatcttagtctcattataggtgatgttatattttgtgtcaacacaatgtaaggaatcttaacatcgaattctttgaaaattgcaaacggcctagatcagctctttttccattaaagcatttacggcgctgcagatcgcatttttcacgtgcgcgtaggttaatcctccttggacatacgcgacataaggcggtctgataggtccatctgctgataattcaatgcttgctccctgtacgaaagtgcccgctgccataatgacatcgtcttcatatcccggcatatagctcggataaggcgtcacatgcgcattaatcggtgaagcatattgtatcgcctggcaaaaagcgatcatcttatcagggtcctgaaactcaactgattgaatcagatccgttctcggcgcattccatgaaggatttgacgtaaagccgagcttttcaagaaaacgggcggtaaataccgctcccttcaagctttgcgccactacatgcggagcgagaaagaaaccttgatacatttcctgcagtgaataaagcgaagccccggcttcacttccgattcccggggaggtcatccggtaagagcaggcctcaatccacttggctttccctacaagatagccgcccgttttagcaaggccgccgcccgggtttttaatcagggagccggccataagatccgctccgacgtggcagggttcctgctcttctgcaaattctccgtagcaattgtccacaaaaacaatgacatcttctttgatttcctttacgaaacgaatcatctcttcaatttcatttattctgaaagacggacgattcgcatatccttttgaacgctggatgccgatcacttttgtgttcggccggattgcagcccggaccgcttcaaagtccactctgccttctgatgttaaatcgactgcattgtatccgatttgaaattccttaagcgagcctgaatactccccgcctcttactccgacgatttcctcgagtgtatcgtaaggcttgcctgttatataaagcaattcgtccccgggtctcagcacaccgaagagcgcgattgaaatcgcatgcgttccggaaatgatttgcggccgcacgagtcccgcctctcctccgaacacatcagcatagatcttctccagtgtatctcgtccgatatcatcataaccgtatccggttgaaggcgtaaaatgcgtatcgcttactttatgttttctgtagctttgcaggactctccattcattccgttcactgatttcttctattcttttatgaacggcggagatttccgcttctgtttcttcggcggttttttgtaaaagagcgccgtgggtcagtgtgtcgaacatgttgtgtataccttccttacatgaatttcttcagttctccgagtatgctttgttcttcctgtacataacctgagacttcgtagcgttcattttcgtcattaaaataaaggctgtcgatcatggtctctgatttgatgcgtgacattaatttgccttcggcggcaggcacatgaacttcatacggcgtcatcagctcccggcgcaaataagcttcgatttccgcttttagttttgcttcatccccggcgattctggcgctgatcatgatgtggccttctcccgctgtcgggatgaagtcaggaagtgtctcatcacgtttgttataagcggtcagcaccggaatatcatctgcctcaagctcttttaacagaccgaggaccgtctgttcatgtccggcataatcttcattggatgaatcaatgacatgaatgatcaagtctgcttccttcacttcctcaagcgttgagcggaaagcggcaatcagcgtcgtcggcaaatcctgaataaagccgaccgtatcagacaaaaggacgctgtagccgcttgggagcgccatctttctcgtcatcggatcaagtgttgcaaacagcagatcttcttcatagctgtctgagctcgttaattgattgaaccatgttgattttccggcattggtatacccgacgagcgcagcctgaagcacgccgttcttttttcgtctctcccgataacggcttctgtggcggataaccgttgaaagctgcacgttaatttcgtgtatgcggtttctaatgtggcgccggtctgtttcaagctttgtctcaccgggccctctcgtcccgattccgccgccttgtcttgagagattgattccttgtccgctcagacgcggcagcgcgtattgaagctgggccaattcgatctgaagctttccttctctcgtcttcgccctttttgcgaaaatatccaaaattagctgcgtgcggtcgatgatcttcgcttcaattgcagtggcgagtgatttaagctggctcggtgacagttcatcattaaaaatgaccagatccgcttcaagctcttcacacagcgccttcagctcgtctactttccccttgcctatatatgtagcggcatccgctctgttccgtttttgcgtaatccgggtcagcaccgttccgtcagccgtttttgtcaatgaagcaagctcttccatggaatgttcaaagtgctcatctgtcatgtgcggaagctggcagccgaccaaaatgaccgtttctttttttccttcctgttcgttcaaatggatgttcctttctgtgtcgtattgggcagtagtactatcataccaaacccgcagggcgtataccacacatccggcgggttttaaagagagaaataaaaaagagacccctcaaaccggctgagaggtctattcgtgagctgccgcctcatcttttataagtaaatcctggctcttgatcgtcattaaatcgttttttaagtattggtctcccattaaaagtctcatagcctgagcgcggatcgatttttcaatcacgtttctgacaaagcgcccgttgctgaatttaatggggcttgtcgtgcttttcactgtcattaagtaatcttttaacttccactcggcttcctggcttaattgatactcacgctctgctatcatgcgctttgcgatgtccatcagctgagtgacagagtaatccggaaagtcgatgctgatagggaaacgcgattgcaggccgggatttaatgacaggaaatgtgtcatttctctcgagtaccctgccaggatcagaataaattcatgctgtttgtcttccatatgcttgacaagcgtatcaatcgcctctttaccgaaatccttttctccgccccttgcaagtgagtatgcctcatcaatgaataaaatgccgccgagcgattttttaatcagatctctcgttttttgcgccgtgtgtccgatgtattcaccgaccagatcggcacgttccgcttcgatcagatgtcctttggaaagcacgttcatttcgaagaaaagcttgccgatcagtctcgcgacggtggttttcccggtgccggggttccctttgaacatcatatgaagagcttgttttccgactttcagcccttgttcggcccgtttttggttgacgaatatccacgcgtaaatttctttaatattgcgtttcatttcttccatacccactaatgtgttcatttctttttcaatttctttcagaatgctgtgtttggcttcatttttttgcagggcggcctgatattccgcctcagcttccgcatttgtcagcacttgcttttggccattaagaatgatgttaatttgtccgttatttttataggttacagcgcgctccaacatgctcacctctctgttctctctttatcttactcatgatgaagcggttccgtgacatccgcctatcatcatgagacccgttttcctttttatctgtcactttttccgttctcttcgggaatgatgttgaatcctgcgctttcccgagaaatatttttcatttcttattgtattcaacagaaacgggaggacaaaccatttatttttattttccgggaaatgttgggtatatttctcatttttttcatgaatgacagccgtacaagcaccttttgaatatcatcatatgctgtaatgaggtgatggagaatggttaaaatttttatagaccccggtcatggcggaactgattcaggtgcaaccggaaacggacttcaggaaaaagcggtcacgctggagatcgcgctggctttgcgcacgattctgacgaatgagtatgaaggagtttctgtcacgatgagcaggacaagcgataagacggtcagcctgacggaaagaacggatgccgccaacagctggggcgcagattattttttatccattcatattaactcaggaggcggaaccggattcgaaagctatatttaccccggtgtcggagcgccgacctcgacttaccaatcagccgtccacacgcaagtgattcaagcatcaggttttaatgaccgaggaaaaaaaacagccaacttccatgtgctgcgggagacaagtatgccggcgattttgacggagaatggttttgttgatacgtcagctgatgcaaacaaactgaaaacagccagttttattgaaagccttgcaagaggacatgccaagggcttggagcaagctttcggtctaaaaaaaaaggctgacttatataaagtgcaaatcggtgcattcaaagtgaaagcaaatgctgatgcgcttgccgccgatgcggagtctaaaggttttgacgcgattgtgcttccaaaaggcggcttatttaaagtgcagatcggcgcattctcttccagagattatgctgaagcgttggccgcgcgggccgaaaaagccggatttgatgccttcattgtacaagactaaatgaaaaaacccctgctctcccttttttgggacgaacaggggttttttgttattgaagtatatcggcgacaaactgagaccaagcttcaagacgctgatacacattttcctctttcagttcgctcagtttcagccagcgcccggcgatttgatctttttctttcacttcgacttgtgccgcagacgctaactggagcgcagaaaggatgccgatatgcaccttccctacatcgttttcatcatcattgatcaggccgagtgtgacaatgttttgtttgtcctcctcgcgaatgtacagttcttccgccagctcccggtcggtattctgtttcagcacttccgaaaatgaagccgccccttccatagggttcatgtgtccgccgaagccgagagaaagcttattatggaggcgcgattcccctccgcccgcgagccgttcatacacaaacacctcatcatcgcggcggatgacgacatacggaatcggctgtttaaatcgcgggtcctcttccgcgtcgcctcttctgatttcaaaaaaatgcgcctcaatttgagccataatttttacgatacgttcatcctcgctgttgactccctgaaatgtcagcatttcgttttgaaagacgtcactccgcggtgcagccaagatgatttcatccattttattcatgcccgttcctcctgtcttacctctccactcaagccaaaagagcagatattatatctgctcttcatcttggccaaaataaaaatcttcgtccttaatcggttctaccgtcgcctttttgtagccgttccctttcatggagaagaaatcatgtgattttgttttggtgtttaatccgtttaatacgatcggattaatatcctcttcttcaaagtaaggatcgaaccctaagttcatcaaagctttattggcgttatagcggatgaatttctttacatcgtgtgagagtcccacttgatcgtacaagtcctctgtatattcaagctcattttcatataactgattcagaaggtcaatcgcaaattcacgaagctctgcttttttctcttctgtctgtttattataaatttcctgagcaaggagaccgacatacacgccgtgaatcgcttcgtcccgaaggatcaggttaatgatctcaccgctttgcatcagttttccttgtccgtagaaatataacggataatagaaaccgctgtagaaaaggaagctttccagatagacggaagcaaccatcgctttgaacagtgaaatttcatcatctttttgaatggctttgtaaagcccgacaatcatttgcgcttttttctgcaaatatttattttgtttaacccattcaaatacttcattaatcgtttcagtcggagcaagcgtcataaaaatatttgaatatgattttgcgtgcaccgcgttttccatcatcgccatgaaattaagaaccgcttttcgctgatggccttcaacgtgctcggccacaatcggcatgcccgtgttcccctgctctgtatcaagcagtgtcaggccggcgagcaccttcatgtacgtatcctgctcatttttacccaagtacttccaagtaagaagatcgccgtttaatgcgatctcttccggaagccaaaactgctttacattttggttgtaaaacatttgggtgaaatcatcttcatgctttgaccagtttgctgcgtcataaatttttgtcactgtaaactctcctttaatcaaacgacacaagaaagacagctgtcctgcccggtatctttcgttcttgcatagtaaatggttttgatgcctctatggtgggcatacagatcaatacgattcagatcacgagttgtcatcgtatctttcaaaaacagggtaaagctgattccctgatcgatatgctgctggattgtcgcgatcatatccaccactttgaacatgtccatatcataagcttctttgtagaagaaccagttattagacgctaaccccggcatcgggtaatacgtttttgaatttccgtatgttctttcttcgatccgttccatgatcggcataacggacgccgtgctggattggacgtaggaaatggagcctgtcggcgcgatgcacagtctgtagctgtggtacatgccgttttcagcgacaaacgccttcagctctttccagtcttcgattgtcggaatgtgcatgccttcaaagagcgcagcgattttttcgtatgccggtgagaactctttttcgatgtatttattgaaatattctcccgttgcataagtggagccttcataatgctcaaacgtttcgcctttttctttcgcaagctcagctgaacgctgaatggaataaaagttcaccatcataaagaacgtattcgcgaaatctcttgcttccgggctttcatacgcgatgccgttttgggccaggtaaccgtgaaggttcatggcgcctaaaccgatggacttcatcgctttgttcgcgcgtctgactgccggcgcgttgcggatatccgtcgtctcagatacatgagtcagggaatccgtcgcgagtttcaccgtgcgctcaatcgatttatgtttcatgacattcagtatatttaatgaaccaaggttgcaggaaatgtccaagccgatttcgtcttcctcgtcataatctgtgtaagccgaaacctgtgacgcctgaagcacttcagagcaaaggttcgagaatttcacttttgatacgtggttattcgcgtgctctttgtttacgttatcctggaacataatgtacggataacctgactcagaacggagaacggcaagcttttcaagcagtttgcgcgcattcactttttcttttttgacacgcgggttgtcgacaagctcctcatacatcgccgtcatgtccatttcgtccatatgctggccgtattctttataaatcgtatgcggatagaatacataagccgctttatcctcacgtgcaagctcaacgaacttatccggaatgacgacaccgatagaaagcgttttgacgcgcacatcttcatccgcagaaatctttttcgtatcgagaaaatcattgatatcgcggtggaaaatatttaaatacgccgcgcctgagccttgtctttggcccatttggtcagcgtaacggaacgcattatcaagaagcttcatgacgcctacaacaccttttgtggcgttttcaacatctttaatcgcttcacctttcgcgcgaagcttggacagattaagagaaaccccgccgcccaatttagacagctgcatggaaatatcgatcgcccgtgaaatatcgtttaaggaatcgttgacttcgagcaagaagcagctcaccagttctccgcggcgttttctgccggcattcaaaaacgtcggtgtactcggctgatattcctgattgatcatcagattcacatattcttttgctttctcagtgtcgccgtttgcgaagaacagcgcaacgattgagattcggtcctcataacgctcgaggattcttttcttgtcattcgttttcaaagcatagtcattatagaatttaaacgcactcatgaaggaaggaaaacgaaacttctttgcgtaagctgtcttaaacacttctttaatgtcttcaaaagagtaaaggcttaagaattcctcttcgtagtattggttttcaatcaaataatccagcttctcttttaaatcgtgaaagtaaactgtgttttgattgatatagtcaacaaaatagctatgtacagcctctttatctttatcaaactggaattttccatcttgttggatcatgatttcgttatttaactggatccattttggcacttgattttgtgacaactctttctacctcctgagtaaacaattcaacgtctttagatgtgccgctgagttcaaatttgtgcaagatcggcacctgatattgtcttgaaatggtatcggcgctttttgcaaagttatcgccccatactttgttgccgctcgcagcgactcctaataagagatgggcgtatttttcgagaaatgattgtgttgatgccggtacctggccgaagtttgtcgtgtaggtgaccaaaacaaacggagtgtccacgtggtccgtttcgtccaccttgcggatcagctggaagtctgttttattcacaaaacgctgaacattccctgtctttgaatcaaatatgatttgaaccatccttatcacgacctatcaaaaataatgaatctcttaacactatatatagtatactaacctctcagaaaaacacaacatattgagatcgatttataaaaaattcatatttttgaaagagcggactttggctctagcccgattaacgcccaaaaaagagagcagaacgagaatcatctctcatcctactcaaggtgtcatgtgtaagccgatgtctatcataacatgaaaaaaaactgcttagtagtctagacttttattcttattttttgtaagaatcacattttttttcgctttcaacggtttcttcaatctccacatcagcaccgatttctttcagtacggctttcagagcgcttgtgatggaagcctctctgatcagttctttgccgtcaacgatgatgctggttccatattcatagcaggaatcatcttcacaagtttcttcccaatggttgattatcaccttgtgtttcaatcgtctcaccctctgcatgatcaatgtcagtacttagtgtagcttgtgttgcccgctttgtaaattcgaacgcttgtgaaatttattcaagctcatccagcgccgtttcttttttcagttcaattttattcgttttttcatcatagcggtatatttttaagtaaccgtcctcaacgatgccgaaacgattatgttccagctgcaccatgccttctgtctgcggttcggtatccgttgaaccgccgtcatcatccgtcaccaccgtctcatgattgctgcaagctccaaacagcaaaaaaacagcgatccaaacgagcgtaatcctgattcttctcagttcattttcactttcgaacacgattttccgaacccccttttatgtttccgatatacagcctgcaatatacagatgcgcatagaaaaagaccattgttcatggtctttttcaaaaagtctattcaagctcaagctggacgtttttttgcggggcgaacgtggagatggcatgtttataaataagctgctgcttcccctccgtttcgagcaaaacggtaaagttgtcaaagccttttacctggccgcgaagctggaagccgttgagtaaaaacaccgtgacgaacgtattgtcttttcggatttgattcaaaaactgatcttgaatattaatcggtttcatgtttcgtcctccttggttctcaatacaatactgtttcgattaaatttccagttttcctgctatgcactcgaaaatttccttttttttctgctcaatatcaacaggcggcgtcatatctgtccatgaaacgggcattttattgcgaaaccaggtcagctggcgtttcgcatatcgccttgaattttgttttaattgctccacagcctgaggaagtggcacttttccatcaagatattcatacagctctttatagccgatcgcctgaatcgattggctgtcccggatattcatatcatacagccgctttacttcgtcaagaaggccggtttccagcatcaggtcaacgcgctcattaatccggccgtacagcacttctctgtccattgtaagaccgataagaaccgcattgtaaagcagctcccgtttttgggttttaagatgctctgacattgtttttcccgatacatgcaggatttcgagcgcgcggatgactcttcgcgtattgttttgatgaatggctgccgccgcttccgggtcggctgccgcaagcttggcatgaagcgcttccgccccttcttcagccgccagtttctccatgcgctcccggaatacagggtcgccggagttttccgtgaacgtatagtcatacagcacggactgaatgtacagacccgttcccccgacaatcatcggcagctttcctctatcggcaatctcggtgatttttccccttaccattttctgataatccgccgttgaaaaagtgtcggacggctccaaaatatcaatcaggtgatgcggcacgccttctgtctcttcttcggtgactttggccgttccgatgtccatccctttatatacctgcatggaatctccgctgatgatttccgcattcagcattttcgcgagtccgatgcttagttttgtttttccgactgccgtcggtccgacgagtatgacgacaggctgttttttatttttcaatatgtatcactctcttttataaatctccccctaattatagcattcatttcttcaggcacctatccattttgccctttttcctgagcgctaaacgtccactaccacccgatcggctcgtttccgacaacctctctcgtttttcctttgagtgtatggcggtgcgttttccgcccttcctcccgcggatcgtaaacgacgccgccgtgctgaatctgaatcggctcattgtaggcggcaaaggtggtctctgaaagctcatggtaatgtgttccgtcaaccctcgggatggcagggccggaaatgccgtaatacctatgaaaatggccgttttcaaacgaggtgatgcccgtatagaaatgtgtatgctcatctgtattgctgccgttctccggctgcgaaaagccttcaatcaaatggtaatgcccctgcactacatccgtaaccgcccggtatgcgtgtgtgtgcggaggtttttttgaccaatcggactgatacaggcccacaaaagctcactcctttatttttttgataaacgcccaatcaaaaattggtgggctgaatactctgttatcatctcaaatttattcttggaggtaccttaattatgaatgaagaatacacatacgcagtagatagtgatatgagacagtttgggcggcctggatttgggttcggacggcccggatttgggtttggccggccgggcttcggcttcgggcgtcccggattcggatttggattcggacggccgggttttggatttggccggccttggtttggttatggattcggacggccgtttggtttttacggcggaccgtttttcggagggcttgtcggggggcttgtcggaagcgctttattcaatccgtacttgtacgggggttacggctacggctatccgtattactattgacgaatcaaaaaggctcctccccgggggcctttttgtataggcctaatgtcttgacttggcgggcaaagttcggatattattttattttactgccttaaacaaaaggcataaggattatgatgagagggggatttgatatgattctgggttatatcttcctcacaattgctattttatcagagtcaatcggcgcggccatgctgaaggtctcccgcggatttacgcggtttttgccgagcgcgcttgtagtggcaggctattcattggccttttatatgctttcactgacactgaatctcattccgctcagcttatcctatgcaacatggagcggagccggaacggtgctcgcatccattatcggagcgaaatggtttcatgaaaaactggacaagcaggccgtcatcgggctctttttcttattggccggtgtcattttgatgaattggtagaaaggagaggcatactgatgaaaggattactttgcttggcattagccattgtatcagaagtgttcgggagcacgatgctgaagctgtcggacggttttacgcacttatggcccgctctcggcgtcattgccggaatcggagcctcttttatgtttttgagcttctcattgaaaagccttgatttatccgccgcatacgcgacatggtcaggtgtcggcaccgctttaacggcaattgtcggcttttttgtttttaaggaggccatgacagtcaaaatgatgatcgggcttgttttggtcatcacgggcgtcatcctgctgaaccgttccaagtctcaaaaagctaaaaaaaatcaaacggcccggagctgaccgtttgaactcgtcaagcgcgggcagcttttacttcaacctcaagctccatctccacgtttccttggaccgctcgtgaaatcatacatgaggactctgctttttgcgctaacttcctggcgagcgtaaagtccgtttcggctgcatccggctttaataatataaacggacggtgaatgattttctggtacgtgaacacaccgttcgtgacgtctacaattccttcagattccatatgtagatcttctttatccaggccgcttctttccatcatcgccgcaagcgttataatataacaggtcgcggccgctccaagcagcatttcatcaggatttgtgccttctccgggtccgtccatttccttaggaatggacacagccgtttccagccggccgcttttaatatcgccgacgtcattgcgatttccgggccaatttgcttttaaataaaagtgatgttttgccaagggacaaacctccttttttttcagtttactcatctttcactcgtttgtctttttttaagctcacgaatactcttgattgatcactctttttatcgtacggacaaaccggtaaaattcctccgtttttgtgaattccctttcgcgataatcaaaattatcaaaaaacgcttcccgctgttctctgctgatctcaagctgtatgctcagcccggtttgcgcctggttattgatattttcggtgttaaccccggccagaccggtttttgaggttgccaattctgcagaaaatccgtttcgttcgagagctctcaccaattttttcgcccgcttccgatcgcttcctccgacaagagtatttttctcgttgcctttataaccgtgcactgcgataacataatggtgctgcttaatgctttcgactgctgaaggctcatcgaacttggtgctcgtaatatgaagagtctggttatcatgcgtttttaatccctcaaacaggtaggttgaataatcatcgctgaaagagcggacgatctcgctcaccccgccctcaattctccctccgtgcggcgacatgatcaatacggggctcccctttcgcttattgtacgatatatgataatcatcggggtcttcatgttcagccagatctttaaaatctgtgtatgtatcagaagaattcgagggatcaggatctgacgcataatgagcacatcttattagtaagaccattgctacgataatgatgacattaagtaaaattcttttcatcagctctccttctttgctcctttctgaaaaatgacatgttcattatatggatttttgtcaataggtcttatcttaacattctattaacattatcatcagtgaaaaacttcccggtttcgaaaaatcaatggattgtcacggttcaagcgctcaaatgccgggcatcagtgaaaaaaggttgagagagggcaaaaaaaaagggaggaacgcccgaattttcaggggcgggagattcacggccggaaacggacggcatcaagaatacgcttttaaaaatgaatatccgcctcccgaagcaaatgcacaggacagaatggagcccgtcaaaaaagttctcatctgcctttttgtacagcaaaatgccgttacagcccgctcatcccctttttttatcataatggtccgttttgaaatggagccgtcttttttcatatatataatatcaatcggaagctgtttttccaaggaatgtctcaatattatgttcatatatatacctccttccgccggcttcattataaacgaacaaacgttcttcttcaactcgatttcttctcctgaaaaagccgcaagtaaccagcgctcctgaaggacaaacaaactgaccgaacatacggcctgttcatatggtatagagagaatcgccagaatgggaggaaaagtatatatgtttggttactcaatggtacaaatggtgcggtcaaatgctcataagctggactggccgctcagagaaaacgtattacagttatataaacctttcaaatggacaccttgctttttgcacaagtttttcgaaaaaaaggtgaaaaacagaaagaaaatgtcagtcatcattgaatttgaagagggctgccatgaatccggttttcacagcacaggacaggtcttatcaaaagaaaaacgctgcaccataaaaaagcagtttcaaacaattaattgctgcagcgccgaagtcactccgtccgcccttcacatgcttctttcgcaatgccgggatatccgtaaaatctatttaaaccgtgaagtaaaagcgctccttgatacggcagctgaatcgtctcatgcaaaagaagtgacccgtaacggcaccgtattaacaggaaaaggcgtaatcgttgccgttattgataccggaatctatcagcatcccgatttagaaggcagagttatcggatttgcggactttgtcaaccaaaagacagaaccgtatgacgacaacgggcacggcacccattgcgccggtgatatcgcaagcagcggcgcttcatcttcgggtaaatatcaggggccggcgccggaagccgatctgatcggagtcaaggttttaaacaaatcaggatcaggaaccttggctgatatcattgaaggtgtggaatggtgcatacaatataataaagaacacacaaagaatccgatcaaaatcatcagcatgtcactgggcggagatgcgctcagatatgataaagaaacggacgacccgctcgtcaaggccgttgaagaggcatggaataaaggaatcgtcgtctgcgtcgccgcgggcaactccggtccggaagctcaaacgatttcaagccccggtgtcagcgagaaggtcatcacggtaggcgcctatgatgacaatgatacggccggcaatgaggacgatacggtcgcttcattctcaagccgcggcccgactgtgtacggaaaagagaagcctgacattcttgcgcccggggtcgatatcgtatctctccgttctccgcgttcataccttgacaaattacagaaatcaaaccgtgtaggctccttgtatttcagtctgtcgggcacgtccatggccactccgatctgtgcgggcattgccgccttaattcttcagcagaacccgcagctttcgcctgacgaagtgaaaacactgatcaaacaaagtccggatcaatggacaaatgaagatccgaacatttacggagcgggcgcagtgaacgccgaaaacgccgtgccgaaagagtaacctttttatcatgagaacggggtcgtctgcaccggcagatgactccgtttttcaggtgaacagatgaaacatttataatgaaggaactcggaatgcttcagaaccggctgtcagaaaaaaagatcaatgcaaggcagtgtatttctaaaaaaatagggaataagtatggtgtagataaaaggaggaatcacaatggcacttacaaacaccgaattgtctgaatggctgcaaaaacagatcggacaaacgcttgatatcagaaaaggagagctgacagacagccgaaacgagatttctgatatggaccagatcatgcttcaccttgatgatgttctcgtccgccggacaaatcatcccgatgactatgtagctgacgaagaactcgtcctaaaaggacacggcacaacctatacggaggaaggaaatgtcccgctccctcaagatgcgtatgaaatccctttgctcggcgacattaccatccaaaaggagcaagacggattaaaggtacatacagatcgggccgtttatacaatcgggacccggaaagagcaataaaaagaaaaaacgccctgaatcagcggcgtttttttattggtttttttcttcagaatatccgtggaacatcgtgaatgcgcaaagcataatgcctaaaataatgataatcggaagccagatcacggcaaacttataatccggttcggcaaaagcgcctatgaccgccccaaaacaatacagcaccaaggcaagcgcgcgcaaaacagcatctctcgtaaactgcttccgcttgtccgctttgtaaaaccttgcggtgagatcttcaaaaaaattagcgagcgttcccgttaatacggtcgtggaaatccccgctacaccaagttttctcgcggctgtcgtctgcattcccattgcgaagctgagcagcataatcagcacataaacagaaatggcatctgcaaaaaagcaagagaacaaagcaaacagcagcaaaacagctccttcaatagctaaagcggcagttaccgcagggggccagaatgatttctttttattgcctacaagcagggccgcggcaataacaccggcaataaatccgattaacgaggttaacgatttgagtacggcaaggtgccatgagttgccgatcgccaggccgaacagaacgatgttccccgtcatattggcggtaaagatatgtcccaggcttaaataaccgatcacatccacaattcccgctgttaaacaaagaagtaaaagtgcaatatttcggtatgtagtcactgtcaatgtgatccaatcctttctctgctgattccaacatataagtttactctttgccatttcatatgtccagccggcgcgccgctttttcaaaacataaaaaaactccggcgaaccggagaagttactgaacgataaataatactctcgtgccgtcggaatatccgctcatttgatttccaacccatgaaccggccccgcggttatccgacggggttacatatctgatatcagcccccgccccgccttctgtgcagactgccatgggccattcatcacggtcaaacccgggctttgtcggaattcctttcaatgattctttccttctattctccgctccgccccgatcaattgtacaaatctcagaatgacctgccgaaatggcgtcttttatatgatttcccgtctccggatattttgacagcgggaaatacagcacctgatcgtatcgggatgcggcacgagcagcactgtccgaatggatgccggcgcccgtaaggccgaactgaagagagatcaccaaaagcagacttgccgcccatttcataaacgcattcattcacatcctccttaagaagttgatatgaagcgtaaatatgtatattagccggatttaacacacatgatgaaatggcaaaaaaagtttgctgttttgttgataatcaacgaaaatggcggctttacgatttgtctattgaaccggcttctgtttccttatatattttagacatacttatgagccgttgtgatcagtgtcttcggcagataaaaggaggaatgccgtccggtcggcaggcaccggctgtttgttatgtcttttcaaaaacatgaaggcggggaaatccagatggaaaaaacaatgtttcacccacactcacccgagtttcacgaaaacccttttgcggttttaagcagattcagagagaaggaccccatacataaattcgaactgcagcgtttcggaggcacctttccggcttggctcatcacgcgttatgatgattgtatggcgtttttaaaagacggcagaattacgagagatgtaaaacgggtcatgccgaaggagctgatcgcgaagctgaatgtcagtgaagatatcgattttgtctcagagcatatgctggcaaaagaccccccggatcattcacgccttcgatctttggtgcatcaggggttcactccccggatgattgagcagcttcgcaccgggatagagcagatcacagaagagctgctggatgaaatggaaacaaaagcagaccctgatatcatgagagatttcgccgcaccgcttccgtttatcgtcatttccgagctgctcggaattccgaaagaggaccgcgccaaatttcaagtgtggacaaacgcaatggtcgacacgtcagaaagcggacaagatgcgaccaaccaggctctcaaagaatttaaacaatatatgaaaacactgatcgaagaaaaaagaaaacatcctggtgaagacttgacgagcaagcttatttacgctgaagaggacggtcaaaagctgagtgaatcagagctgtattccatgctgtttttgttagtcgttgccgggcttgaaacaacggttaaccttcttggctccggcaccctggcgcttcttctgcacaaagaccagatggagaagataaagcggcagccggaaaatatccagatggcggtcgaagagcttttgcgttatacctctcccgtcatcatgatggcgaatcgatgggcgattgaagatttcacttataaagatgtttctattaaaaaaggtgaaatgatatttatcggcatcggttcagccaatcgggacccggaatattttgatgatcctgatactttaaatatagcgagaacaccgaaccgtcatatttcttttggattcggcattcatttttgtctcggggctccgctcgcccggatggaagcatccattgcctttaccgcgcttttaaaacggtttccgaatatagagctgaaaggcgcgcccgaggatgtaacatggagaaaaaatgtgtttttgagagggcttgaaacattgcctgtcagattttaatatcgcccccctgtttatcgggggtttttttaatgtcttatcaacagaaatcaatataataatgaagatttagtacatagttaatttagttctatatagataaaaaagcggccggattgctccggccgttctctattaccgttttaccagctcattagtttcgtccagcttttttctgaaagatttaaggaaatttgcgcttatcgttcctttgtttgcgtacagtttttcgcagaatgctttaatggcgttttgcggctttggttccgacagcattgtgacatgattggaagagtgaacgtccaacaggtgaaactgttttatctggcgttcccattctttccaatacgcatcatggtctaacggaatctgttcttcctctgctgtcagataacgttcaagatctccgaggaacaaaccgcttttattacggaagtagtagcatagcagcgcttccggatgaggcagcggcttcatgtcatactcttccattccgtaggcgagctgcgtcttcatcatttgctccagctgcatccggatcgcttcttcggattttggcagaccgcgctttttggcaaggccgatcaattctttcaatacttcttcttcctcagcctggacggtaatgtcttctctgctgattaatgcctcttcaaggttttcaggcttaagatatgctgtaagcatcgtattgatcgtttgcagcatgactgacttaacagatggttttctttctttccatttttcactgtacggggtgtcgatcatgacggcgctttttaccgtatgaccttcctcctgcaagaggcgcgcggtttcgtatgcaagcattccgcccaaggaatatccgccgaggtcataagggcctttcggctgtaccgcttggatgattctcatataagaagcggccgtctcttcgattccttgcagcggctctttccctgtcaaacctcttgcctggatgccgtaaaaaggccgctgactctttttggcgaatggctggtatgcttcaacgcctcccgttccgccgtgaaaccaaaaaacaggacggcctttttctctatcattcagcttgacgagttcgggaaaattccggcccgcctcctgcgattggttcgtttttaacagcatgctaatctcctgaacagtgctgcatttctgaagagcctccagactgatgcgggtgtctccgtcctcaagtttcttcagcagctgaatagaggagattgaatcgaagccgtattcagtcagcggcatattttgatccatttccgctggctccatccccaaaatgtctgccacaatgtcagccgcgctcccgcagcggatctgaggattctgtgaaaccggtgtaaggctgatgtcttctggctgaccaccgttccaatacttatggttttcaaaaggatatgtcggaagcggcactctttgaacagatttgccttggtggagtctgtcccacggtatatccgcacctttcacccagcaaaatgcaagcttttccagattgttttcagccaacagcgtctccgtgacgactgtaccgagagtcccttccagtaaaacgccgatatctcctgatccaatctgctgactgcctgtaaagaagcttttcattccattgctttcttcggaaaatgctctgtactctttcagtttttccagcaattcatcttgattgcgggcaacgaatgccaggcggcagttcatcgcctcacggccggtctgaagcgtataagcaatatcccgcaatgacggagtatctccagtttgcacaaaatcagccagctgacctgcggccgccttaaggcgcccttcgctcttagcagaaagcacgataagctgcggttcatgcacagattctgtgtctttaggactcaggctgtactgttccaagacgacatgcgcattcatgccgccgaagccatagctgttaattgcggcacggcgcgggatcggtctgcccgtatggtcgatgagctgtgtccattcctgattgtcttcggtgaaacggaagcggcttttctgaatggccatttgctcatttgcagctgtaaatccgggaatgcccgggatggtatgatgcttcatggccatcgccacttttataagggcggccagtccggaagcgagttcgccgtgcccgatgcaaggtttcacggtgctgatataacaaggcgcgctttcctcttgatttgcggaatcgccgtaacccgctttgattgcattaaactccagcgcatctgccatttcggaggcaatgccgtgcgcttcaatataagtgacggtttgcggatcaacatcggtgtcttcgtacgcttttttcatcgcggccttcattcccgccggattcggggcgtgaagcgacatgcctttaccgccgtgagacactcctgttcctttaatgaccatgtgaatatgatcgccgtcttcaattgccgcctcaagcggtttgatgatgatcacgcccgccccttcgcttctgacaaagccatcggcatctttttggaacgatttcgcccggccgtttttgcttaaatatcccattgagtcaaaaccgataaagcccttcggcgattgcagaatattggcggctcccacgacagcctgctcacattcgttatgacggattgattgaaccgccctgtgcaatgccactagggttgacgtgcaggcagcctcgtaatattcactcggtccttgtaaattcaaggcatatgatatcctgttcggaatgatggacgggatggctgttccattgttcggatcgctgttgcctgcggcaacgaaaacgcctgtcggtctgcttgataatgccttatttgtcaggcccgcatcctccattgccttccatgtatgcatcaaaagcagaaactgctccggccccatttgtgatgcctctttaggggaaattccgaaaaagagcgggtcaaattcgccgacaccgtcaataaaaccgccccatctgagactcgtgtcattctcatcaccagcgtaacggcgccagtcccagcggtccgccggaatttcggtaatacagtgatccccgtttatgatgtgctcccaaaaagactggatatccggggattgcggaaactgagctgacataccgataatcgcgattccttgcttgatatcggcgtgatcacaaggcgtatgctgtttcttcggtaaagtgcgctcttctgtttccgtgaccctggcctcttctgaatgcttatgatcggcaagcaattgagaaaacttgctctcatatgctgacgcgaagtggcgggtcagctcctccgcggtcggatactcgaaaaacaatgttggattcacatcgatgtccgcctcttggccgatctcttttgtcagcccgatcaggctcgctgaatcaagtcccaattccatgatatttgcgtcagaacgaagagatggcgcgggttcatccatcatcttggcgagcttgccaaggacgtagctgcggatatcatctgtcagactgccggcagaaatcggtgctcccgcattcttcacagccgttcgggccggctgatttatctgttcggttttcgggcggaaccgtttcagggcatagccttcaaaacgcatcaccacttccgatcgcctgctgatgacatctgcgttaatcagaatcatttcccccgtttgtttggccagcttgatgtgcagccagcaatcggtaagatcttccgggctgctgaaggtgacggaattaatgccgaacggcagatagctttccgcctccgtttggtccaataaagaaagcgaggccaagtaagcagtgttggcgattaatggatttacggcataatgatgcgcttgttgtgagtcgctattgttcaggttcactttcgctaaaacggcatcagagcctttgtacaggcgggtgatcgttttaaattcttctccccacacgacagttcccgttccgtctccgtataactcatctatccggcccacttcccggtaagagcgctgaatggccgccagatccgcgtgctgcttttgaaacggatacgggctgcactcggcatacgccgctatgctccaatcaggagacgtgaggctgcggtgcattatgctcagttcaaatccatccccgttttgtttcgattctgttttcagctcgatgcgatcgcctttttttatggtaatggggctcgcgtaatttagttttttaatttgtcctccttccgcttcaggaaaaatttcacaaaaacgatcgactgccagactgttatatgtagcgccgacgagtaccggttctccgctgaattgatgccctttcacgtatgggtcgtcatcactgtataccgcctgaacgccggcatcgttttctgattcaccgaattgaaaagaagtcccgtggtcaaaagcgtaggccggcagatgaacggcgtgctcttgctgcaactgatcaaacgcgatattctctcctttttcccattgccgcgcacgccggccaatatcagaatcggagaaattgagattccgctgatccatgcggtaagcggacagcttttccagcagttcctgaacggaagcagccgtaaatgccgcccgatactccgaatgatgcgttcttttttgcagcgcggatgcgatggcggccggatgaagagatggcgtcttttctaagaaggccgccagtctctcaagataggcttgaaaactccattttgttttcgctgacacagggaaaatatattcctcatcgccgtgacgggcctgatcggaattcgggctgatatattcttctacgatgagatttgcatatgccccgcctgccccgaaggaattgatcatgcttctccgcggtatgttgtcccccgtttcggcatccctcatacgctcccaatactcggttttttcctgcaggtaaaaagccgtttgttcaaggttgatattcgggttttgcggttttgcattaatggttggaactaatgtttcccgctccatttgcagcagcactttcgcgagctgggacatgccggaggccgcctctaaatggccgagatttgacttgacggatccaagcgcgcaaaaacgttttttatcagtatattgcgcgaacgcatttgtcagggcaatgacctcaatcggatctcccaatacagagccgtttgccgctgattcaacataactgattgtttccggattgattcccgccttgtcaatggaagccgccatgagcttcgcctgctgtttcggatccggagccgtgtacatctgccttccgccgctatggcacaacgcgctgcttttaatgaccccgtaaatatggtctttgtcagcaaccgctttggagagcggcttcaagagcaccgccccgactccttctcccggcatcaggcccgtgccggttccgaagcttttgctctcacttccctgttcaagcaaattcgcccgttcgagcgcatcatatttagacggttcaagcgtgagattgacccctccggcaatcgccatggaacagctgttaagcttcaggctttcacaggcgagatgaatggcgctcagtgagctggagcatgcggtcgtaacgcccatgctcggacccgttaaattgaaaaagtgggaaatgcggttggcgatatgccaatcccctccgttagagctgagcgcggctttttccaatgacgggatattccagaaatattgattgtacatactgcccataaatacaccgatgccgctgtctgattcctgccattcgtttactctttctaacgagtaaccgccattttcaaatgtttcccatacggtttctaagcttagacggagctcaggcgtcatctccatcacatggtcttcccggatgtcaaacaagtgatggtcaaaagcgtcaatatgctgcagaaatccgccgtaccgtgttttgtgttcttcttttcgtgtttcttttgccattgttttcagaagaccggatttccatctgttttccggggcttccgtaatacagctgtctccggcttttaaatgttcccacagctcatcgagcgtttcagactcgggatagcggccgctgatgccgataatggcaatgtcgtcacgatcaaaacgattaacggtgacggtttctgtttccggctttggcgcttttggctctttttgttcattgataaatcgccgcgtttccgtgacaagcggcaccggttcattcattgcaggttccggatgctccgtttcaggaggcgcttgttcggctccgaatgcctgttgcagcttatccgggtaagtttccagcaaatactcggcaagttctttcgtattcgtgtgttcaaataagatcgttttcggcagctcgcccgtcaatgtttccagttcgcggataaaattcacctgcaaaatggagtcgatgccgtatttttcaaagctggtttccggctgaatgcgctcgggagcaagctttatggacttggctaacgtttcttttatgaattgcacagtccggtctgtgactgagaaagacggttctgtgaaatcagccggctctttggaagccgcagtttcttcaaccgcctgcgcgtccggctgcttttgcctgatgacgccgtcgctttctgccgccacgatctgctggccgaggtgatgtgacgattccgccataaatgtaacgtaccgatatccctcgctttccagcgcagactgccacgcttcaggatacagccccgggcatccgggaatgcgcagtttggcgtcttcatacagccaccagccttccaaaaggccgaatgtcaggtgagaataaaccgaatggctgctgatctcatttaatagcaaaatcccattcttcttaagcaccgctttggcattgcgaagtgtccgccgaatattttttgtcgcgtgaagcacatttgccgcaattaccgcgtcatatgcgcccgcctctataccctgcaaagccgggggctcttccacattaaaccgcttataagtcaaatacggattgtcgggaccgtattctttttcagcatgcatgaaaaaggcctttgacagatcggtgtagcaatattctttcacatgatgtttgtactcttttaatcttttgaaaacggccgcgctcgtcccgcccgtccccgctccgatctctaatatccggatttccgcgttcgggtcttctttcaggcgttcttcaatgaaagccgtcaatgtgtcagcgagcacctcattaaagtagtctgccgtttcattgtttttatagattccttccaccaattccattgaggaatcgggaaacagaacatcagtggcagaaactctgccggataaaatatccggcagagctctgagagcggtctccactaaggtgatcatcgcctctttgctgctgtccttgagtaaaggagctttcttttcatcccattcttgccacagcacgtccgcacgctctatcggacccgttaacacatacgtactgcctgactgtttcaaaaagcctttttgcaccaagatggagatgctttcttccagccacctgccgtaaaacccctgcatgacaggctgcgtttcgttttccgtgaaaaatccgacagatttcagctggcctgccaatagtttgtaaagaagatcttcagtgttttgcaaagctgtcccctccttaactcaattgttgtacatgtcttgttactttaggctgatagcttcgcagtttttgcatcgccgagccgtgatgttcagggtatacttctatcatttcttccggtttttcctccggctcttccgcctgtttcatcatgacgaactgattcaacgggccgccgagcaatcgttcaagcgccgccattgcttccggcgcttcaattgatccgactcccgcctgtttcatccgttcttgatagtcggcagatgatacgattccgacactgccccagtagctccaattcatcactgccgccgaatacggccgcgttttagccaaatgagcggcaaaggcatctttgaaactgcatccggcagcataattgctttgtccggccgctcgtgcaaatgattgaacagatgagaagaacaaagcaaagtccagcggctcatttcggaacacgcgggccatattcacactgacattgacttttgcagcgagcacgcttttaaaacggctttccggcatatttgccaggctctgatcctctaaaacaattgcggaatggatgattccgttaatttgcgggtgcgtgcgtttgatcgtctcatacgcccgtgtgagctcattcggatttgccgcgtcagcttcaatataaatcggagccgggccgaattggctgagtctgtcaattttttcctgtatggcgctgttatgttttcgtctgccgatccaaacgactcgcgcctgatatgttttcacggcatattcgctccatgcctcgccgatgccccccgcgccgccgatgacgacataaacgccgcctttttggtaagcgggccggcttgaaaccggctgctgtacaggaataaggcgctgtttgtaccagtgattgttccggtacgcccatgtattgccttgctcatcaaacggcgctgagaacagctccgcctttgaaacatcttccggacatccggcatcaatcagccttgtttgccagttcggatactcttttgtgagcgagccgaccaaaccgtgaatgcctgcatgagccggatcaataatgtccgccggctgtacggactgtgtttttattgtgactgcagtcaagctgattcgcttgcctccatatcctaaagcaagcattgccttgatcactctgtacatctggatgacgcccgcatcttgagctttcaccatgtcatcagcgctgtgaaaaggagcgatccatacgatatgcccgaaagaccctgttgctttcagttcagctgcaacagcctctatttcatcctccgggttgatatgaagccgtttcgcagaaggatgatgtaattgaaaagctgcgctttcctcatcccccgcgataaagacaacctcttccgtcttatatgccgggctttgatcacggaattccgcgagatcccacaccggagccagaaggtttgctccattcaatgatgtttccggcgcggggccttccatcattctggaagaaatccctttaattctgacacagacccggcctgtctcatcgcataagtcaatgtccatacgctgtattttttcatccgttccccgggagctgacatacgcccacatgcttgtcgtgcacgggctgaaaatgtccaattcttcaagggcgaacggcagtgacagctggttatcatctgcgtgcagcttcagtccgattgtcgcttgcaaagctgaatcaagcatacacgggtgaagaacgtattgatctgccgtttcttcgaggaaagaaggcagccggagctcagctaatgcttgattgcttccgatatgaatctgctgaattccttgttgtcctggaccgtagtcaatgccgattttgctgaataagccgtaacactgttcagaagtcagtatactgaggccgcattgagctttcagtgcgcctatatcacggtgcggagcctccccgccgctgagaatgccggcagccccctgacagtgtatctgcctgccgtttgcttctgtttgtgagtccgtgtaaatgtcatacacgatttcaccgtcttccctcggaatcaggctgatttgcgcttcaatcgggcgggttcccccttcgatcggccgaacccaaacgatgtttttcaggcgggtggcagacggacgttccttttgccctttgactgcctgagcaaccgccgccctagccatttccaagtaggcaacgcccggcataaccggcttgcctttaatgagatgatcggtaaaaatcgtctcttgtcccgtaaattcggatcggtaccgctgctctgttaaatctgatacattttcgtgaagcagcgggtgcagtacccgcgacgtcggcacagcttgcggtttctctgctttcggccggttgtccgtgatccagtaccgctctttcgcaaacgggtaagcaggaagactcatccgttggggcttgatatcagaatataagccgtcccatttgatatccgcgccctgcacccataattccgcaagcttgtcattctctcggcggcttaacagctcttcgatatccgcttcgccgtttgcgcctgccagaatggatttcagggaggttttacccgcttttcctttataaatgcccgctatatcataacgtcctttcgcacagctctttagcttgtcccgaagttcttcggccgaggaagcgataatggccgctctttcttccatcgcatcacgtccctgctgaagcgtgtaagcaacatcggcaagatccgcatccgtaaaagaagcttgcgccagctgctgcgcctgttcctgcagacgctcttcttctttggccgacagcacaaagatttgagggtgggtgaaaacagctgtttttctttcttccttcgggatatattcttcaatgacgacatgggcgtttacgccgccgatgccgaaagaactgattcccgcacggcgcggcagatgattgccgttttcgtctttcaatgccgtccattctcttttttcctgtacgatgtaaaacggactgtctttcagcttgatatacgggttgatgacctcgctgtggaggctttttgcaagtgttttatgcttcatctgcatcagcactttgatcacacccgcgacaccggctgccagtgacaggtggccgatattggttttggccgaacccagaccgcagtgactcgcgtaaacggcggaatcgcctgttttttcgtacagcttttgaaaggcggatttcaggccgttgatttcgaccggatcgccaagctccgttccggttccgtgtgcttctatataggtgacggttctcggatcaatgcctgctttgtcataagccgttctgacgacttccgcctgggctttcgggttcggtgtcgtcaaggagttcgcgcgtccgccgtgattgaccgcgctgcctttaatgacgccgtaaatatgatcgcccgctttttccgcttctgacagctttttcaaaaacagaattccggcaccttcactgacggcaaatccgtccgccctgtcggagaatgttttacatttcccttctttgctcagcgctcccgctttgtcataagcgatgtggccttgcggagtgacgacggtattcacgccgccggcgatcgccatatcgcagttcccgttttcaatggcgcatacggcgtgatgaatcgcgaccagcgagctggaacaagccgtgtcgatcggttcactcggcccgtgcagattaagcatatagctgacgcggttcggccccgctgacggactcatatttgcggctgacgcaccgccgatatccaggtcggaaaacagtgagccgtatccggtattccccgtgccgatatacaggcctgttttcgagccggaaaggcttttagcggaatatcccgcatcttctatcgccttccacgcatacatcattaacaagcgctgctggggatccatctgttcggcttccagcggtgaaattccgaagaacagcggatcaaaatccgcaactccgtcaataaatccgccccactttacatttgttttgttggcttcattaagcgggtcaccgtaatactcccgccagtcccagcgatccgccggcacctctgttatacagtcttttccttcttctaagttgcgccaatactcatcaatatttgcggccttcggaaacaccccgctcatgccgacaatggcgatcggttccggtttatgttcagccgccgtctgaacaggctgtacggcagtttttgcaaatcgtttgttccctgccagtctgatgccgccatcatctgtcacaccgctttgtttttcttctttcggctgtgtgctgccggtaaattgtgtttgatagtcttctgctaaatgatgcgccaaggcttgaatcgtcgcatattcaaaaaatacggtcggtgtcagatcaagctgataagtgtcattcagcttgttggcgaattccgtcagcgtaatggaatcaaatccgtattgattgaactccaattcgatatcgatttcttcaatgtttattttcagaagcccggaaacctcttttgccagcaattcctgaagttttgccgtcaggtctttcggcgcaggcgtttcctccgttttcttaaccggtgcaaaagcggctgcaggagtcttttgaagcagcttttcccgcattacggcgccgtttccttccatgacgagcacgcttgttttccccgtgctccatgctttgtaaagagcttctattccggtttcagtgcgcatcggcgttacgccggttcttttttcggtgagcttcgccatttcttcatcgacttgcattccgccatctttccaaagcggccaattgattgacaatgtatgaccgtggcggtacattgcggtaaccagtgcgttgcggtatgccgcatagctgtccataaatgcgtttgccgccgcataatccgcctgtcccgcattcccggtgacgccggaaatggatgagaaaacgatgaaaaagtccagcgctaaatgctcggttgcctcatcaaggttgacaaatccgtccgttttaggggccagtacactgtaaaactcttcggttgttttctttgcgatatactgatctttcatcacacccgcgctatgaatgatgccgtgaaggccgccatattccgtttcaattgttttgaccaggtctgccgcagtttgagcgtttgttacgtcagcctgcttgtattccgcttttgctccgagtgattcaagcgattgcagctgcatccgctgattctcgcttaaagcggaacggcctgtcaaaaccagtgtcggctctttgactttgcgggcgatttctttcgcgaaaataaagcctaagcccccggctcctccggtaatgagataaatgcctccgtcgttccacggaatgcgtattttgccgccggacacggccgtttctttgacatctgcgctgtatcggatgccgttttcatatttgatatggctgtcatcagcccgtgttttattttctctgatgatgtctgtgattctgccgttttccgccggttctatttcaatcagctgggttttcagttttttatgttccaggccagctgtttttaacagagctgaaatgcctgagagcagctgatgcttatctgttttagagagaaccgtctggataaggacgtctccatccgtctcttccttcagcagtttttgcagcgtctccaatatccgtcctgtataatcacggaagcgcgccgccgctttcccgtgctgggaggtcatttcaatacattcagctcccgcggcttcaacggcttgatttaatccggcgtctgtgtcacaaagcaacaccatatgccgggcaaaaaccggttccgtttgaacggcggtttcatcgcttcgggtccataccggctcaagcatgagcgttcccggagctttttcttttttctcaggttctttttcagccgttctgaatgataaacctttcagccttacgcacaccttgccgttttcatcacaaatatcaagatcgcgtttttcaatctggccggctttgtggtcttcagaaagtctggcatatacccacatctcagcagcgcatgcgctgaatacttcaagctcctgaaccgcaaacggaagcatcagtttttcatcatttgttccggttaatatgcttgatgcctgcaatgcagagtccattaaacccggatgcatgacatactcctgtaccgtgtccgcacaagccgcatcaagtgacagtctgcccaatacgaaatcatcacctgtataaatcgctttgacaccccggaaagccgggccgtaatcaaaaccgattttgcggtacatatcgtatacttcatctgcagaaaacggtgtctcggcggattgtgatctcagcttttggagatcaatgaccggagcctcggcgtcagggcggactgatactgccccttggctgtaaacggacggctgatctgtttcctgaccgctgtaaatgtcgaattgaacgtcatttgccgtttcaggaatgagacggatgttgacatgaaccggctcgtcttcaatggtgatcggccgcacccaaaccgtattcttaagcttgacgcttccttgtccggccggaacttcagatgcctgttccattgctgcgcgcgccatttcaagatgggccacccccggtaaaatcggcacgccttttacaacatggtccgcaaggtaaaattcttctcctgtatagattgagctgaaccgctgttctgcaaggtttgaggtgtttctgtgcagaagcggatgaagcgcgtcttgttttccggcagacacagtgcttgttttttcgtgttttccggtgctttttgccgcccaatagcggtcttttgcaaaaggatacgacggcaggctcatacgtttaggcggccggtctccatacagcttcgcccaatcgacgttcagccctttgacccataattcaagcagcttcgcgtatttgccgcgtgccatccatttttcaacggcttcttgaatttcttcatcttccgtcagcatttgcagggtgcctttgtctattcttcctctgtacaaatccgcgtgcttatctccagtgataaactgtgacagtttttcctgcagttcttctgcggatccggcaataaccgccaggcgttcttccatggcgtcccttccgatttggagggtatacgccatagaaacgaggctgcattgatcgtaccgcttttctgtaagcgcacgtttcagctgttttgcctgctctttcaggcgtttttcatttttggcggacagaacgaaaagacatgggtcgatatgagagtcatctgcttcctctctgtcttctgggatgtattcttcgatgacgacgtgggcatttacgcctccgatgccgaatgagctgatgcccgcgcggcgcggctgttcgtttccgcgttcgtccgtctgcgtcttccattccatcgtctcccgcaccagataaaacgggctgtcttcaagctgaatgtacggatttaccgtctcacagtggagactttttactaatgtccgatgcttcatctgcagcaaaattttaataatgcccgctgctcccgcggcaagggataaatggccgatattcgttttgaccgagcctaagccgcaatagccggccgctttctcttttccgtctgcaaacgagctgaacgcttgtttcaggccgttaatttcaaccggatctcccagttctgttccggtgccgtgggcttcgatataagagactgttttcggatcaatgcccgcttttttgtatgcggctttaatgacttccgcctgttgtttcgggttaggcgttgttaaagatgccgcgcggccgccgtgattcaccgcgcttcctttaatgacgccgtaaatatggtccccatccgcctcagcggctttcagctttttgaggaaaaagagccctgctccttcaccatgggcaaaaccgtcagcctgatcagagaacgttttgcatcttccttctttactcagcgcgcccgctttgtcaaaactgatatacacatccggaagaacaatcgtattgattcctcccgccaaagccatgtcgcacgtcccttcttcaattgaagaaacggcatggtgtatggcaacgagcgagcttgagcaggcggtatcaatcggctcgctcggcccgtgcagattgagcgtatagctgacacggttcggtccgacagacggacttgtattcgccgcggatgacccttcaatctccgcatcggcattggctaaaagagaaccgtagccggtatttccggtcccgataaacacacctgtttttgtgcctgagagactctttgacgcatatccggcatcttcaatcgctttccacgcgtgcgtcagcaagaggcgctgctgagggtccatttgctccgcttcccggggtgaaattccgaaaaataacggatcaaattcagcaattccgtcaataaacccgccttggttgacgtttgttttattggcttcttttgcgggatccccgtaatagtcccgccagtcccagcggtctttcggaatctcggtcatgcagtctttgccttctttcaggttcttccagaaagattcaatgtcttctgccatcgggaaaatcccgctgatgcctacgattgcgatcggttccggcccttggtcccgctgcactgtctgcggaagtgtctcaggcagagtgcggcgtcgcttaacggccgggcgcgtgatttgagtctcttttaccggtcttgccgattgaaccgtttttgtatttaccgcaaaccgtccggcaaattcctcttcgtattcactgattaaatgaacggcaaattcatggattgtcggatgatcaaagaaaatcgtcggcgttaacgtaagccggtacgttttgtttaactggttcgtaaactcagtcatcgagatagaatccagcccgtattttgtcatttcttcatgaggatcaattttgtcaatgtttacttttaacagtgaggccgtctgctgttttaacagatgcttcactttttcaagcaggctgtcagcatcaatgtcatgacgtacgccggtctctgcttccggatgatcattctctttgcggaacagttttgctttcatgtgtttcacatctccttcaagaaccgtcatccgggctgtcccgctcatcaagccttgatataaagccttgatgccggcatctgtgccgagcggtgcgattcccgcctcctgcatcagcatattttccgtctgctttcctgcctgcattccgccttctttccataacggccagctgacagaaagcgtctttccgtatctttgtcctgcggcttgtaaagaacggcggtactcggcatacatctccataaagacatttgcagacgcataatcagcctggccgacgcttccaagcacacctgataaggatgaaaagacaataaagacatctaatttctcatgttgtgacgcttcatcaagatacacaaggcccttcactttcggagcgagaacgtgttggtattcctctgccgtcttcttcaccatgtagttgtcttttatgatgccggcactgtgaacaatcccgtccagcttgccgtgccgtttgcgtatattgcggatcaatcggtatacttctgcttcatccgtgacatcggtctgctcgtagaaaacagaagcgccggcagcacgtactgtttccagcatgtctttctgcttttctctgagagcggaccggccggttagtaagatgacggcgtcttttgtacggtttgcgatctcttttgcaaagatcagacctaaacctccggcacctcctgtaatgagataaacgccttcgtctttccacggaatgtccggctccgcttgagaaatatccatctctccccaatcagcggcaaagcgcttgccgttttcatatttcacatggacgctttttgcatgcatacggttttcggacgctttttccgctatgccttcagcactttctttctcttcggcttcgatcatttgacagatcagcttggaatgttcaaggcatgcggttttgaagaggccggtaatgcctgagaacacctgctgtaagcctgctgactgcgtaacagcctgaaatagaacgcggcccttcggcttgtttttcattatggttttgatatggtcaaacagctggcccgcataagaatgataccgctctgcaatagatgcgggacgatcgtccaagataatgacgcttgcatgttcaagctttgcttcgacagcttgttttacggtttcatcgtactcacaaaggaaaatgatatgctcttcatacgttggctcgtgatcggccggttccggctgctctttccagaccggttcagcgagcaatgtgtccgtacggctgaccgaaacgccggcacttgcgttttcttccatgatccgcgttgagaaacctctcatccgcacacaaagcccgccgttattgtcatatagatcaatatcggctttttgaataggatcgccggctttattgttcgcactgaatgtgacgtgcacccacatatcatcagcgcacggattcagaacgtccagctcctctaaagcaaacggcaatgcggctttgaatggttccccgctttctgcaagcagcgctctcgtcacgttttgcaaatattcggcggcctgaagcgcaccgtccatcatactcggatgaaggatataatcagcttttgtatgagagacggattcaggaagcttcaatttagcaagcagccggtcttcgcctttgtatacaagctgcacccctttgtatccaggcccgtaatcagcaccgatcattcctttgtaaaacgcttgagattcgattgttccctgcgtgcaccagcgcttcagctgctcaatatccgccgcttcccccggttccttccggatgatttcagcgatgccctgattataaagaggagcttcttcaccgatagaatcgttacccccgtacattctgtattgaatctgtccgtcctcttcttcataaagtccgatatggacacggacagcctcctgatcggctatcaccggacggacccatacaatattctttaagcgcaggcccagagaatcctccggtgccccgccgatgcttttctccgccgcggcccgtgccatctcaagggtaacggcagccggcacgatcgccattcctttaatgatatgctcggcaataaaatactcttttcccgtgaattccgaactgaaccgctgctcccgcaagacggatgtattctgatgtaccaacggatgcaaaagcttggtatccgtttgcttcaccgtttcttccggccagaagcgctcctctgcgaacgggtaggtcggcgcactgattctttgcggcgcggaatcctgatacaataagccccaatcgacacgcgctccttcaacccagagtgccgccagtgctttcagcttttcatcccgtgtctgacatgccgcaagctcttccatctcctgagctgacacttctctgcttctcactttttcgccccgtaagatgttttggtcattgccgttgatgaaatcctgcagctgacgcttcaaatcgtgacgatcatgactgataaaaacggctctctcttccatcgcttcacgtccggtctgatacgtaaatgccagatcatgcaaggaaacatcgttttcggcttcatccagaaagccggataaacaggatgcataggcagtaagacgctgcttatttctcgctgacagcggaacgatataaggcggctgtccgtcctttgatccgctgatcgttttgttttcatactgttcaaaaatggcgtgtgcgtttgttcctccgagtccgaatgagcttaacgctgcgcggtgcggcgtctctctctccggaagcggttttctcttatccgccacataaaacggcgaaccgctgaatttgatattcggattcggcgaggtgtaattaatggtaggcgccagctcccgatgatataaactcatggcgactttgatgcacccagccagacctgctgctgtatccaaatgtccaatattcgtttttacggagccgatcccgcaatactgctcccggtccgtgtaacgtttatacacttgctgcagcgcggacatttcaatcggatcacccaatgtcgttcctgtgccgtgcgcttcgatataggaaatcgtctccgggtgaatattcgtgctgtctaaaacatgctggatgacgtcagtctgaccttttacactcggtgcgtaaaaaccgactttatccgctccgtcattgttcagaccgatgcctctgagcatggcgtatatgtgatctccgtcctgaacggcttgtgacgcctttttcagcagaatgacggacgctccttctccgcccgccataccgtcggctgaagcatcaaatgccttgacatgcccgtcgcttgaaaaattcaaaccgttttggtgcacatagccgatgccggtcgctgcatgcagagttgctccgccgacgagcgcgtattccgattctccgctcgttatgcttttgtaggctgaataaagaccgactaatgatgatgagcaattggaatgaacgaaatagcttggcccttttaatccgagcttatgggaaaccatcgtcggaatcgtgccgctctgcgctaacacccatgacacatagccgtcgggagattcatggccttctgtcgttttttccggcaaaagcgaccgatacgaattattgcttgccgacatatatacgcttgtcttcggaatctctttcgatacatatcccgcgtcctcgacggctttccaagaatgaagcagcagaagccgaagctgaggatccataaattctgcgtcttttggagaaatgtgaaagaactcagggtcaaagagatcttttccttctatcgtcgataatgccggcacatagtcgggattttcgatcaaatcttcaggcacgccggcttcccgaagttcttcttccgagtagaaccggacgctttcctttccttctcttaactgcttccaaaactcatgatgatttttcgcgccggggaactggcaggaaatccccactatcgccacactgtcatcaaaataagacggcaccccgttttgcggtgtttgttctctttctctctcatcttggccgtacacctctgattcagctgcctgttttgtttcaacaataaatcggctgatcgcctgaatggtagagtgttcgaataaatccgtgacggtaaaatcgcattccagctcctgcttaatgcgctctgccgccgcaacagccagaagcgagtcgcctcccacatcgaaaaagccgtcttcggttttgatgcccgccgtattcagcaggtcttcccatattgcggtcactttcgcttccgcttctgataacggcagtctgcccgtcttttcagaccggtgaacgattaccttgcgctgttttaggtctttgcggttcacttttccgctcggtgttaacggcagcgcatccagacggataaaatgggcaggcgccatataatccggcaggcttgataaaagatggttgcggagcgctttttcgtctgccgtatgaccggagcgggccgtataataagcaatcagctttttatgtccgttcttttcctgaaccacaaccgcctggtcaaggatatccggatgttcgctcaatttcgtttcaatcgctcccaattcgatgcggaagccgcggattttcacctgactgtcaatccggccggcatattctatatttccgtcaggcagccatctggccaaatcacctgttttgtaaagtttttctccttcactaaacggattatcaataaatgatgccgccgtcagctcaggctgattgtaatagcctctggccagaccggcgccggccacgcaaagctccccggccacaccgtcagggacggggctgagcttttcatcgacgatataaagccgcgtattgtgaatcggtttcccgatcggcgtattcctgcttgtgatttccttttggccgcagctgtagtaagcggcataaatggatgtttccgtcgggccgtatatgttttcaattctggcatgtttgaagatggaaactgactttttgactaaatctttcggaaacgcctcaccggccaccatcacatatttcacagggccgtcttctgtaaatgccgtatgccgctttaccgtttccagaaatacattaaacacggcgggcgcaaaattcagatgcgtgacctggtgggtttggatgtattccatgcaaagctgcggatttttttctgcaccaggcggcaaaatgacaagccgtccgtttccgataaaccagccgaataattcagaaatcgaaacgtcaaatacgtaattcgtttttaacagataggcatcctcttgagcgaccggatactcagcttccaaaaactgcagcgtattcatgatggccctgtgctcaaccatgacgcctttcggttttcccgtgcttccggacgtatatagaatataagcgagatgatgcggttttgaacgcggcgtcagttttgccccgctgacagaacgtccgctgttttcaatttcaaccgtgctcacaccgccgatggccaactgttcaatcatgccgcgcgtcttttcctgcgttaatacgattgtcacgccgctgtcagtcaacacgtgggccatccgttcatttggaaaagccgggtccagcggcacatacgcgcctcccgcttttaaaatggcgaggatgccgatgaccatctcaaaagaacgctccgtacaaatgccgaccgggcattccggtgtgacgcccttttcttgcaggtacacagcgagcgccgtgcttcgttcatctaattcgcgatatgtaaggctgttttcaccgaatgtgacggcttctctgtcagggtggcgtccggctttttccgcaaacacttcatgaatgcagcgctcattcggctgatcggatgaacggctttcatcccgtttttgattgagcaggccggaacaggcttcaaaagagatctccggatcagaaagcaccttctccgccagtttcatataatgctccgccagccgttcgatgaaagaagggctgtagacatccgggttgtacagaaattgcaggacggttcccgtttcttttttatagacttcaagcgcaagctcaaattcgccttcctgatgaatgtcttctatcatttcaatgccgagtgattgatatagttccgccagcttttccgctccttccgtccggaagaagttttgatagaaaaacgcggtttgaaaaacaggcgacaccgcaggcgagcgttccgtcttcaattcttttacaagcgcgggaaacggatatgcggcatggtccagcccttctgccagtgtcagctgcagctccttcaaaaacgacgtaaaagatttggcgcccgtctccctgcttctgaccgcgatcatattaataaagtagccgatgacagactcaaattgagcctcagaacgccccatcgtcggcatgccgacgatgacatcttcctgattcgtatattgatagagcagtcctttgaaaatagcgagatacacaacggattcattgacgttatttttttgggcgcaaactttaatctgccggttcagttcatcaggaagcaagcgctgatacgcctgccccctgcaagtttgaaccgatgatctcgggtaatccgacggaagctcaagcatcggcagcggtccttccagctgctttttccaataagagagatgtgtttttcccgcttcgctttcaagcagctctttttcccatttcacaaagtcatgataatctgcggcctgctgaagcatgacaggttctttgccttcacttgcttttacataagcgtccagcagcgccgacataaacgtcataagagagacgccgtcaaaaatgatatggtgaatggtgattaacacaatcggctcccgcttcgcctgccggaatacttgaacacgcaggagcggcccggtttcaagcgagaacggttcttttgctttttctttaataaacgtaagcgcatcacgcccgcttaagtcagaaagatccatttcttcaatcggaaaatgccgatccgtatcttctatctgatacggaaggccgttttcctcttttatcacactggtcaaaatagggtgctggcgctgcacggacaaaagagcgtttttgaatgtctcgatatccagcttttgaaaacgaaagcataacggaatgttatatgcgctcatctccggaaacattttctgaagcatccacaaacctttctggccttcagaaagcggacgttttgcagttgtccgcttagaagcctgaagcttttgttctacttcagcgatggtgagcgttcctgatctgtaggcatcgagaagttctttatgattcataggtcttactcccttctatgatgtcttgcactcttttaaaatctaatgtcccctcagagacctgtttcatcatggcgatgatctcctgatccgtatactccttgttatccggagcggcggcttctgtttcggtttcttccgttcggtaaaacgtttcgatcgtttctttatgttctgtcaggtaatagctcatgacgtctccgagcgtggcatagctgtaaaataacgccggagtgacttcaatgccgtaatgactcgtcaaaagagcggcaaatttggctaaatagatggaatcaaatccgaattccgcccagtttttatgcaggacgagtttatctttggatattttcagcagactgtgtatctgctctttcaaatccgcttcgagccgtttttccgtgctttcttccgggatgcggcggctcacggtttccaaaagcgcatccggttttgatgaatcgtcccgccgtatgcctaaaaatcgttcggcacggcttctttcgccggcaatgacaaggcactgggtgtggtcttgagaaatgatgcgctcaaaaagctcaatgccttcatctgtttctaacaggcgctggccgcttgatttcaggtacatgcccgtcgtctcttcaccgccgacggccattccgccgtttttccagaccggccagtttatgacaaaagcgtttccgctttctgattgttcgtttttatagtgggcatacgccatttggaacctgttcgcgaccgcgtaatcacagcagccgaaatcccctaaaacagccgatgtagatgaaaagtagcagatgaaatccggcgtttcgtttttcagccactcgtcaagaagcaggcttccgtttattttcggttcaagcgtactgcggaaattcccgatttcattctcaaagacggatgttctgctttcgatgcccgccgcatgaatgacgccctgaatggctccgaatcgttctttcgcgcgcttgatgcagtcgcccattccgatcggatcacaaacatcggcttcagcgtaaagaacacccgcgccgagattttccaggtctttcattttttctttcttttcttcattgatcggcgaccgccccgtgagaatgacatttgcctggtagttccgggcgagatggcgggcaaataagtagccgagccctcctaatccgcctgtaatgagatatgttccgccggttctgatcctgctgttttctttcgttagtccggttggttcggtgtgatagacatatcgttttccctcttccaagaaaacggtatggtctgtttcagctgtcagctcgtcccaaatggttctcatccagtccgttatggccgcaccggcttttctgaagtggccggtaacacttgttttcgggagaacaatgccgagcgaacgctcaaagccgatccatgattccaagtagcacttttccagaccggatgcatattcccccgccaataacagcctttccggctgcagaccggtctcagccattgctttgagaatatggacgatacatgaataatcttcgatgcagcttttatcttcaagcgcccataaatacaaaatggcagaagcttcaccgtactctttttgaatatccgcaaaagcgttcacatatgattgcggatcttcccgcaccacttggcagcgcccggcggacaaagcctcataccggtctccctgagcgataaaaataacgtcaatgtcattgtcatacgatttgatcacagagatggcttcctgctgcttcttctgatcagataagaaagaaatcaccgttttgacttgcttttctccggctgccggcagagcctgttctttaaggacttctctaaaagccatcacttcaaactgttccgccggatcactttcatcagccggcgacttaacgggcgcggccttgctttgtacaggctgctgatgccagaagcgttctttcgcaaacggataagcgggcaggctgatgcgggccggaggacggtttccgtataatttcgcccaattgatgtccaatccttttacccaaagctcaagcagcttagaatatttccgtttactgatccaagcgtctatgattgtttccatatcatcatccgccgaaaatacggcaagcatccgtttgttttcttccgtgccgtcacggtgcagtccggcgctgttttgtccggcgataaatccattcagtttttcctcaagttcatgaagtgaatggacgataaaaccgagacgctcttccatcggcacccggcccgtctgaagagtaaaggctatgctcataaggtcgcggccgctgtatcttttttcacggatggcgtctctgagctgttttgctttttcagtgagccgttcgctgtttttcgcagacaggacgatgatggcgggctgatctgccggcgtctcatcaggctctttgtctgccgtatattcttctatgacgaggtgggcgtttgctcctcccgcgccgaagctgcttaaccccgcccttctcggaagctctctgccgccgatgacgggacgtttccactcaccgagctcctgctgaacggcaaacggcgtatacgcgaaatcaatattcggattcagctgttccgcgtgcagggacggcgcaatttggcggtctttgagctggaatagtatttttgtcagacccgcaattcccgcggcgctttcacaatggccgatatttgattttgcggagccgatggcgcaaaactgtttgtctgttgtatcctcttcaaatgctttctttaatccggcgatttcaatcgggtctcctaatgcggtgcccgtaccgtgggcttcaatataactgacggtgcgcgccgggacgtttgccctttggaaagcttcttttattaaggcggcctgcgcattcggattcggaacggtgtatccgttcgttttgcctccgctgttaatggtgcttcctttaattacaccgtaaatgtgatcgttatcggcaatcgctcggtctaacggctttaatacgaccgcgcctaccccttctccgtctacaaaaccatccgcgcggtctccgaacgatttgcacgtgtcgcctgcggaaagcatgttcatgactgacagattcatataatggatcgggtcggtcactatgtttacgccaccggcaatcgcgcattcgcttgaaccgctgtatatgctctcaagcgccagatgaatggccgtcaaagaagaggagcaggctgtatcaacggcaatgctcggcccttggaaatcaaaaaggtaagataccctgttggcaatggaccaatagccgtagcctgtcgggtagtttttgttcatcgcgccggcaaaaacaccgatttttctgctttggcacaggttgtcaggcgtatagccggcatcctcgatactcgcatacgccgtttctaaaaataatcgctcctgcgggtccattcgctctgcttccaaaggagaaatctgaaagaacagcggatcaaacttgtccatatcctcaatgaagccgccccatttcgtataaatagagccttctttacctttctcttcatcgtagtaatcccgccagttccagcgttcccgcgggatttcttctatgcagttttttccttttttaatatttgcccaaagctcagccgctgtttttgcctgcgggtagcgtcctgaaacaccgatgatggccacgtcgcgaaccgaactttgccggacggtctctttggctgcccgtttttccctccgccgccagtcagtgcgaagcggcttagccggctgtacagcctgcggttctggtgatgccttccgctcttcctgaacaggcgtttgtcccgtcagtttgatcatcgcgtcttttttcgttttgattaagtgagcgacgagcgcctcgatcgtctgatattcaaaaaataaagtgctgctgacttggtccaatacatttcgtaacgcgtttgtcagctgtacgacgacgatagaatcaattccgtatttttcaagcggcgctttcggatcaatttgagccggcggaatttttaatgtttctccgattaacgttttcaagtactcggtgcttttttctgttaaagacgtgtcgcctttttgcaccgttgtttgcgcctgaagttccggcgcatgtactgcttttggcggagcggtccgttttccggcctttgcttgaagcgttttttggcgtacaatgccgttgctttttgccgctataatctgatggcttaattcatgtgccgcttctgccgggaagaagacagaatgccagccttcactttctaaaacgcgcttccagctttccggatacaagcccgggcaccccggaatacgaagggcagaatcttcatgcagccaccagccttcaagcagtccgaaagtaatatgcgggaacaggctgtttcccgccatttcatttaagagcagcaaaccgttgtcttttaaaacggcttttgcgtttctcagcgtctgacggatgtctttcgtcgcgtggagcacattagccgcaacgacgatatcgtatgcgcccggctctatgtcctggccggcaagcggcgcttccgcgttaaaaagcttatacgtcagataaggattccgtttgccgtattccgtctccgcatgcacgagaaaagcttttgatacatcggtgtaacagtattcttttatatggttttgatacggcctgagcttttcaaatatgcctgcgcttgtgccgcctgtgcccgccccgatttccagtatgcggatctcggcttttgaatgtttgctgatgttttctttcacatatgccgttaatgtatctgacagggcgctgttaaagtaatccgcgacttgattgtgcttataaattccttcaacaagttccatagaagagtgcgggaacatgatgtctgtcgccggcacgtcttcgcgcagaatgtccggcagtgctttaagcatcgtctcggctaaaacagtcatcgctttcgtatcggcgttattgagccattccgccttttcccgctcccatttttgccatagcgcggcggttgtgttttcggcccgcgccgacagtttatatgaatccgcattcccttccagatagccatgttccaaaaggaaggcgatcgtttgcttgagccattttataaagtattcatgctcgggctcatacactttaaggctttgcggcgtcagcaagtccgcttctttaagctgggcgatcaacagctgatacagaaaatcatcgagcttctgatgttcagcctctcttacaagacgtgcgccgggcggagcgaccttcggctgttgtgaaaagacaatcggctgaggcggataaacagaaattttttctgtttcactcatcccttcgactgcgaccggtttggtcgtatgaatgaaggccgcctgatcaatcggcagcgtcataagagtttcaagcgcctccatcgcagcgtccggttcgatcaatcccaatccgatttgatccatcagctgaataaaatcgccgtctacagccgcttcgctgttgccccaatagccccaattcatcactttgaccggacaattccatgtctgatcaagttctttcgcaaatgcgtcactgaaagcgcatcctgcggcataatggctttgtttcacgttatgaataaatgccacaagcgatgagaagaagagcgcaaagtcaagcggctcccgtccaaatacctccgccatagacacacttacatcggcttttgcccgtagcaccgatttgaactcttctgtcttcatattatttaagctttgctcagacagatccattgccgagtggatgattccgttcatttttgtgtggcgctcttttatgaactgataagccctctctaaggaagcactgtcagcggcatcggcggaaacatattcaggcgccggaccgaatgcgctgagccggtcgagtttcgcctgtatggaatcattcagtgtgcttcttccgatccaaatgatgcgtgctttgtagcggcggatcatatattcactccatgcctctccgagatacccggcgcctccgatcacggcataaaccccgcctgtttggtacagcgtgccgtttttcggcatattgtcaagcggtatcagctgccgctcaaacagctgctgattgcggtacgcccaaatttgaccgtttttcccggcagaaagacggagcgcctcttcgatcggccagctgccgtccgtttctgtgtcaatcatgcggatatgccaatgcggatattctttcgccattgttccggcaagtccgctgactgcggcttgtgacgggtcggcgctgtcttgatcggaaaacggctgggcatttgctgtgacgatgcaccagtccaaatgtttttctccgtaccctaaagcaagtaatgctttcatcagcttaaacacatgaagaacgttcctttcctgttccttgaggctgtccgcactctcagcctgcggagcaagccaaatgatttgctccagttctttttgtccttcaagcatgtgcgtaagagatgtgatatcatccgtacctctgatcggataataggaagcgttcggcagatgttcttttatgtgcgtatgtctcgaatccgttccgccgaatactgccgtctgcttatccaccgctgcttccccggctttttcaagcgcaacaggctcccaagccggaatcagcatcgtatggccgacaggcgcctccgtggtttctccgcccgctgtttggcttgtgtcaagcgcccggacggacgcgcctttcatcctgacataaaccgtaccggcatcatcgcacatatcaatgtcaaattttcttacgttgtcatctgctttgctgccttctgtgtaccggatatatgaccagatatgttcagggcacgggccgaacacttccacttcctgcatcgcaaacggcaaagaaagctcgtggctgtctgcatcgtcatgtatcgaacggacaagcagaccgacggatgcgtgaaaagcggcgtccatcatactcgggtgaagcgtatactgttcttttttgtcatgtacggctgctgggagtgaaatacgggccaataatcggtcttctccgatcagcaattgctgtacgcccctgtatgcctctccgtaatccagaccgatcttcttaaaagcaccgtaacattcttccgcagtcacgattcctaaattgcaggaagttttgacagactcgatatcaatctgggcgcttcccggttcggtaatgaccgcttcaccctggctgtgaatgaccggatcttcgccgttttctgcttcactgtatatttcataggtaatctcaccattatcttccggataaagggcaatatgtatttccttcggtttgtcttcaatcatgaccggccggacccaaacgacctgtctgagtgtgacgctgtggtctttttccgtcacggcagcggcctttttgaccgcctctgcggccatttccaaataggcgacgcccggcagtattttttgtccgttgacgacatggtcagataggaaaaattcatctcccgtaaaaagagacgtgaagcgctgctgcgaaaaatctgacgtattttcttgtaaaagcgggtgcagcactgtgcctgaaaggcttttctcctgttttttctgctgcggaatccaatagcgttcttttgcaaatggataagtcggaacgcttgttttacgcggtttatccgaaccgtacagcttattccaatctactgttttcccttctgcccataacgccgcaagccgtttcggatcgtccgtctcaggagcggcttcgctcagttccggcagctcggcttgtccgcgccaaaaaccggagatgttttcgtttccttttacaaaatcattcagcttttctatcaagtcgcgggtgtcatttacaaggaagacagctctctcctccattgcttcacgtcctgtctgaagtgtataagccagttcagacagcaccgtcttttctgaaagcgatcgggctagtttttccgcataggccagaagcctgtctttatttcttgctgacagcgggatgagttttgctgcatcgttctcaggtgcaggcgctttttgttcaggctgaatgtattcttctaaaatgatatgggcgttcgaacctgatgcaccgaaggaactgagtccggcccggcgcggataatgtgtgacttttccgttttcttcagcttcaggctgcttccacggagcagtctgctgctgtacgtaaaaaggagatccctcaaatttcaggtaaggatttaattccgcagaatgcagtgatttgacaagcgttttgtgatgaagctgcagcgctgcttttgttaacccgctgatccccgccgctgattctgcgtgaccgatatttgatttgaccgaaccgatggaacaaaattgctgatcctgcgtcccttggctgaacgcttttgacagaccttcaatttcaatcgggtctcctaacgaagtacccgtgccatgggcttccacatagctgacggtccgcgggctgatacctgcttttttcagacaggccttaatgacttctgcctgtgcagcaggactcgggacggtaattccgcttactttcccgacgtggttaacggcgcttcctttaatgaccgcgtaaatgcggtcgccgtcttgttcggctttttccagcggcttgagtaagaccgcaccgactccttctccggaaacgtagccgtccccgccctcgccgaatgtacggcagcggccgtcacttgagtgcatgcccacgcttccgtagctgagatatttcgccgggtgcagcgacaagttcacccctcccgcaagcgcggcttcacattcgccgcggcggatgctttcaatggccagatgaacggcggtcaatgatgaggaacaaacggtatctaccgcgatgctcggcccgtggaagtcacaaaaataggacactctgttggcgatctgcgcataattcagtgaaaccggaaacggatcagtctcagataattgttctgcgccgattaaggaataatctttatgcatcacccctgcaaatacgccgatcggatgctgtttctctcctttattccccagcgtttcaggcgtataccccgcatcttcaatcgtttcccagcatgtttctaaaaacaggcgctcctgcgggtccatcatttccgcctcacgcggtgagattctgaaaaactgcggatcgaagcagtcggcatcgtcaatgaaaccgccccattttgatactgtttttccagacggggacgttacgttttgatatgttttccaatcccatcgggacttcggaacttcagtgatgcaatccgtgcctgccttaaggttttcccaaaactccgccacacttttcgctttcggatagcggccggccattccgataatcgcgatgtctccggtgtttttatggtgttctggcgcgtccggtgcttcagcttcagaccgtgatggttcggctgcacgttcctccgcacattcaaatgaaacggtctttttcagataggctgcgagttcttttatatttgtatattcaaagagaagagtgggcgcgaggtccgcacccgtctttttactgatatcttgtacaatctcaagcaaagaagatgaatccagcccaagctcgtagtagccggctagaacgtccagcgtctcccagggctgaccaagcttatcagccaaaagcttctttaaaaacagaatgatgtctttttcatctgcgctttccgactcagctgcagcctgttgattctgttcggctgtattctcgtcttcttcgagccgaaccgcttttcccgtcatgtttttaagctccgccaccttttgtccggatcggctgaagtactcgattgtcatcgttgtgagttctttttcctgacggacgccggaagcggcgatacgcgccgtgcactctgattgcagcctgtcggcggccgtgaacgattcataatataaaggcagatgaagccggtttgtttcagaaagcaaaccgctcgccccgattccgctcgcatccaaaagggccggatggaataaaaagaaatcctttccttcttcgcaagaaagctcagccagcatgccgccttctgtttcgtacaatcgtccgttcgatttcatcatcccggaatgaaccaagtcatgatccaggcagcggttatacatgtcatcaagattcagagacctggctgactgcttcacatcgctgaaatcaatggtttcgtcaaatgtcacagcatctcttttcaccatttcagccgtcgcatattgtatatcgtctgacagctcgtcaccctgctgtttctgccccgaaagggagatgagccactttccatctccgctatcagaacattgaatggtcagaatgattgcagccgtttcactgacggttaaaggctgataaatcgtaacgtgcttcaattcgagctcattgtatacataaccgtgttcctgaaaaacctgataaatcaaatcgatataagcaagaccgggcaataccgcttcaccaaagaccttatggcccttcatgatgggatgatccagtgagatattgattttttccgatatcattccttcccactcctctctcatttaaatgctttccagaacatttttttcgcaggaagctcttgtttctccgccggtgcgtcaggctcttttaccagagccttacgtcttaatgacggtaccggcagcggctttcttttcattcgggtatctttttcttcccaagcttccagaatgacgtgggcgttcgttccgccgtcagcaaagcagttgatggctgctgacggtctggctgcatcccattcgccggctgttttatgaaagtgaaaatctgtctttgttatatcaaaatgcggcatcggttcgtctcctgagagaaacggaaccgtttgtttatgcttcagcattaatacgactttaatgaagcttgcgatgccttctgcgcaaagcggatgcccgatgttcggcttgattgacccgatgccgagcggaacatgctgacctgagcggtatacggattgaatcgccttcagctctagcaaatcagtcaccgcggaacccgatccgtttgcttcgatataagtgatgtcttccggctttttgccgcttttgaaaagcgcgctttgcatgacgtctttttgcgcctgcatattaggagctgacgggcctgccgttctgccgtcattgttcatggcggcggccttaatgaccgcgtgtatcgtgtcaccgtctttttgcgcctgtcttactgtttttaacagcaccatgccgatgccttcaccgaggacaactccgcctgaacgcttgtcaaatacgtgaaatgccggtttttcgtttaacagcccgcgctcttggaacatccggtgcgccgcatccgtgttcagcaggctgacgccgccaactaccgccgctttgatatcgccgcttctcagtgcctgaacggccatgttcattcctgtcaaagccgatgaacaagccgtatcaagcacgatgctcggcccgcgcagatcaaaaaattgcgaaacgtttgccgctaaataattctgcccgcccgcaacgatcgggttgcgggtattcgcaagaatttcaggatcaggctgatgctggctgcggcctccgatatacacaccggcttctatgcccttgatttcttcacgggtatagccggcatggcaccaaagtttcaagctctcttccaacaccgccaacgcctgagggtccatcgctttcgcgtcgttttccggaatgaaaaagaattcggaatcaaagtgatccatattgtcaatcaatcccgcaacgtattgatttgcatatccgaaacgttccgccgggacggagccgattgcggacctgccgcttctcagcaagtcccaatattggtctaacgattccgctcccggaaaacggcagctcattccgacgacagcaatgtcttcagttacggcatcacgcttttgttcagtgtgaaccgtttgtacggcagccggaaccaagatttctgtatcaggttcctccctttctgtaagcagcggctgcccattggatacaagccattcggcaaacgcgtcgattgtcggatgttcatataaaacagatgggtctaagtcctctttgagcgcttgattcatttgctgtaaaagctgcgctaaaatgatcgaatcaaccccgtaatcctgaaacggttcgtctgtttccagttcttccggagcgattttcagctcatcggaaaacagtttcacaagccacgccttcgtatcaagaagcaggtctctgtctgaatgtttttccgcggctttaccgtttatttcggctttttgtgttttcacttgacagagcagcctatcaggatgccattcgctccgatcaacgatagccggcagaacggacgggcggatgttttcagataaaatgcggtccagcaagtcaagtccttccgcgttggacagtcccagcagcccggtctgcttcaggctttctgtgcggacttcacctaatccggtttccttccagttcggccattgaatgctgaccagcggatattgatgctgatgagccgccgcgaaataatccatgtacgcatttgccatcgcataatccgactgtcccgccgcgagcgccggaacgactgcagatactgaagaaaataagacaaaaaattgcaaaggatcatttgtgaaaaggctgcttaatgtttgaagcccggcgactttcggttcaagcacttcttgtatgtcgtcggcagtctttctgataaacgccggatttactgaattaaccgatcccgcacagtgaatgacaccgccgatcggtcccatcgtgcgccggattgtttcaatttccgctgccgccgcatcatgatcagacaatttcagactgatcaccgccacttgcactccttttgcttcgagctcttcaatcgcccggatcttctctttcagcctcgtattaacggctgaccgttcatgacggggaggaatcggctccctgcctgtcagcactacttttttcaccccgtgtttttctgtgaaatggcgggcgcataagagacccagtccccttgtgcctccggtaatgaaaagcacatggtcttcaggaaacggtgcgggcttatgttctgctcgcttcctgcttggaatctccttgaataaagcacggtatctctgtccgtttcggcggcagatttccggttctgtgctgtccgccgaaaattcatctgcaatttgtttggcaagcgtctgctgatccgtatctgtatcggcatccatgtgtctggacgtcacgttttgatactcattttgaagcattctgtacaggccgctttttgccgctcctgcaagatgaatcgttttctgctgaaatggctccaagccttttgttacatatagcagcgtcagcggccgcgcttgccggcggcttgtatcaatcagagtctggagcctgctgagcccttccagtgaagggtcttcgtctccgcatcccgtcagatcgattgcgccatctatgtgattccaatcgctagctgcagtgtcagcggaatccaccgggagaatgaatgagccagcgaaatgcttcgcagtctcttcggctagctcagctgtccttgcatcagccagaatcatgaccgtcctgccgcttttctcaccggccgaatcgatctcacactgaacccattgcttttctagaaacacagcctcgcgccggtcttctgtttcctgcggtacggctttcggctcaggcagccagtacggctccttcgcaaatgggtaagccgggagactgattctgcggggtttttcgccttgatagagtctgtcccagtccatctgaagccctttggcccacaattccgctattttggcgtattttttcttatcgaaccatgaccttacgagctgcttcaggtcatcgtccgtttcaaatgctttgatttcttttttagccgttttgatatgggcttcatatatcccttcacccgtatttccgtttacaaaatcggttaaacggctgatcagttcttctctcgaaccggctgtaaccgcaagacggtaatccatcgcatcacgcccggtttgaagcgtgtacgccatatctgaaagattgatattctgattggcttttgcaaattcgatcacagactcggcataggtttttacctggggcgcttttttcgccgacagcacaaaaatgtttgtctcatcaggcttacggcttccccggtctttcggctgatactcttcgataacgagatgagcgtttgtgccgctgtagccgaatgagctgacacaggcccgccgcggtgctccgcctgtttcccaaggtttgagttcggtattgacaaataaaggcgagtcatcgaaatcaaaatgttcattcggcgtgctgaaatgaagggtcggcacaagctgctgatgcttcatcgacagcagaaccttctggacgcttgctacacctgccgctgccgacgtatgcccaatattcgatttaaccgaaccgatcgcgcaaaattgtttgcggtccgttttttccttaaatacagaagacagggcttctagttcaatcggatccccctgctttgtgccggtgccgtgcatttccgcataggtgatgctctcagggtggatgttgtgcgcttcatacacttgacgctctaaatccatttggcttttcgcgcttggtgcggtaatgccgttggtttttccgtcctggttaattccagatccgataataactccgtaaatatggtcttgatcggcttccgcatctttcagcctcttcaaaacgagcgcccccgcgccttcgccaggcacaaatccgttcgcactgttatcaaatgctttacattggccgtcaggagacagcattccggcttcacacatgctgatgtatgattcaggcgttaaatacaaggtgacaccgccgacaagcgccatgtcaatttcatgattcaacagcgcctgacgcgccaaatgagtcccgacgagagatgaagaacatgccgtatcaatcggaatggccggtcctttcaaattgagataataaggcaggcgggccgccgcgatgctgaaactgttgcccgtcgcgcttcctcctgtctgatgtttgtttaacatcatgccgtattcattgttcatgatccccaaataaacgccgcaatttttcccgtttaattcttttgagctgtaacccgcatcttcaaaggctttaaaaccttcctgtaaaaatatccggtgctgcgggtccataagttccgcttcagacggagatatattaaagaacagcggatcaaactcttcaatgccgtcaagcataccgattgatctgcagtatactttgcccttcttgtttaaggccggatcatagtatttgtttacatcccagcgggaaagcgggatgtcgcgaatggcgtttttcgcacgggctaagttgtcccaatacgtctttaggtccggcgcatccgggtacttgcccgacatgccgacgatggctatcgcgtccgctatctcgtctttaggctcccgtttggcctgcaccggttcaggttccttttgaaccgttaatctctcaggctcgtcaggtgttttctcctgcagggcatgttgctgcgtaagcggctttggacgtacgggaaccgcctgtttttttctgccgcggacggacggctgcgtacgcagaaaatcggcaaattggcggattgtcggataatcatacactttcgttacgttacagtccgtgccgtaccgtttattgacggcctttatccattcaagaccggtaatcgaatccatacccaagtcaataaaggcctcatcaatatctacttcatcccgctccatgtacaatacatcagccagtgcttttgataactcgtcatgcaccgcttcaatcggttcttccggttcggcggaagctgccgtttcagacatcgcctccagaatatccgcttctgcttgtatcacatgctgcttatgagcgtttaaaggctgcagcatgatgtttgacggttttttcacggcctctgttttctgcggttcggttgcttcctcaaggatcggttctgtcccgagctctttttgcaagaaggccgcaaactggcggattgtcggataatcatatactttcgtcaccgtaagggacgtgccgtatactttattaacagactttatccattcaagaccggtaattgaatccataccgatatcaataaatgtgtcgtctgcgtcgatatcgtccgcatccatatataaaacgtctgccaaactttcggtcaatacggcacttactttttcagcggaaaccgccggacgggaaacagactgtacgattcttttcggtttcgcgccgctcaaaggctgcaatgaaatgtttgacggtttttctttggcagtctcctcgtgaagagttgttacttcaatgaccggttccgggacggccgccggtgcgatcggcgcagactgtgtgtcggccggttttttgacagctgcatctgctgatatgtcgatccaataacggtcttttgcaaacgggtaggccgggagactgattttttgcggtctgcccatttgatacagcttatcccaattcagcggaagacccttcacccaaagctctaatacctttgcggctttgcctttttcaagccatgcctcaatggttttttccatgtcctcatcagccgcaaacagcgccatcgtgtctttattctgtttgacttgtccgcggtagagctggtcaattgactccttgccgcccgtaaattcgtcaagcttctcttcaagctcgcgcaaattgctgacaatcattccgagacgctcttccatcggttcacggccgatttgaagcgtatatgcgatccggctcagatccgcttcccggtaacgcccgctccgcagcgcatcaagaagacgttccgcccgtttttgaagccgttgctcatttttcgcggaaaggacgatcatcgacggatgaggcgcggcaaaagcagtctccttatcctcatcagcggaatattcttcgatgacgatatgagcgttgacgccgccggctccgaatgaggaaagtcccgcggttctcggcaattccttatcatttatgactggtcttttccactcttcaagcgtctgctgcactttaaacggcgtactcggaaaatcaatattcgggttaagcgtccgggaatgcagtgacggcgcaagcttcttgtatttcatttgcagcagcaccttcgtcagccccgcgatgcccgccgcgctttcacagtgcccgatattggatttcgctgagccgatggcgcaaaactgtttatcttgtgtttgttctgagaagacttttgtcagacccgtgatttcaatcggatcgccgagtgaagtcccggtgccgtgggcttcgatgtagctgaccgccctcggatcggttcccgcgtcttttaacgcctgtttgatcaccgcggcttgggcgttcggattcggtacggaatacccgtttgtttttccatcatggttcacggccgttcctttgatcaggccgtaaatatgatcaccgtccgctttcgctttagaaagcggcttaaggagtacggcgcccactccttcaccgggcacataaccgtctccgccttctccgaaactttcacatctgcctttgcttgataaaaatctgttctggccgagcatcaaatatttattcggatgaacggatacattgacgcccccggcaaatgctgcttcgcattccccgttccgcaagctttggcatgccagatgaatggctgttaaagaagaagagcacatcgtatccagagccatgctcgggccgttaaaaccgaatacataggaagccctgttcgcaattgatgacggatttccggtcagcgcaagcgattttccgcgcgcctgttcttctgctccgtaaagctgatattcctcatacatgacgccgacgtaaacaccgacattggcgccaagcaaatcacccgatttttccgtgagctttttgcgcgtgtaaccggcatcttccatcgtttcgtagacacattgcaggaataaccgctcctgcgggtccatcaattttgcatcccggggtgaaatagagaagaattgcggatcaaatttgtccacgtctttcaaaaatcctccccattttccgtacgtcttgcctgctttatctttatcagcgtcgtaataaagactgtgatcccagcgatcgtttggaatttcggttatgcagtcagtgccttcactcaaattcttccaaaattcctgaagattttcggcctgcggatatcgtcctgatataccgataatcgcgatatcttcacgctccgtcagctgctgatttttccgcgtgtctggacggacttgcgcaaagccttttttgcctttattccgtttggaaacaggctttactttcgctttctcagacagcgccggtttggctgcaggagtttcttctgttttcatcccggtcacttccaacagcgtgtcccggtgtgctttcataaaatactgcgccagcgattcgatattctggtactcgaaaaacaatgtttttgacaatgaaccgaagctcttttccagccggcccgtcaaatgcataatcataatcgaatcaataccgtaatcttccataggcgccttggcgtcaattttgccgacaggaagtttggtcacttccgaaagcacttgtttcaagaaatgctccgttttttctgcaagcatgttctctccgcctgctgtaagacctgccgtttcttccgtttcgctgcccttattcggctgatcatccgctgattttttcagaaacgcccggatttttgcggcgtagccttccgtcaccatgacttgggatgtgtttgccgcccacccgcggtacaaagcatgaatgccgttttctgtttgcatagggaccatgccgctttcttttgtcagcatggcttccgtttcagcatcaaccgtcatgccgccgtctttccaaagcggccagcaaattgaaagggtgtgtccatagcgttcatttcgagcttttttacggtttcttttttcactgaaggcgttcataaacgcattggccatcgcataatcagcctggcccgcgcttccggcgcttccggctccggaagagaaaagaatcagaaaatcaagctcaatgtcctttgccgcttcatcaagatgaaccagtccggagactttcggcgccagtacatcacggatttcatctttgtgctttttcagaatatagttgtcttttatcgttccggcgctgtgtatgataccgtttaatccgccgtactgccggcagatgtccgctgtgagcgattgaacttcttgtttttccgtcatgtccgtttgtttgtacacggcttgcacgccgagatcggacagttcttgaagctgggcttttttacggttatccaacagagaacgccccgttaaaataagaacggcgtcttttgcatgccgggcgatttctttggcgaacaaaaatccgagaccgcctgcaccgcctgtgatcagataaacacctttatccttccacggcttttcggcgccgaactgttcaagccctgtttcctgccattgtgccgtatagcgcctgccgttttcatagcgcatatgcttgtcatcaggatgagcgctgcattcttttacatatcgtgacagcgtgtctgccttgacgtccggctccaattcaatcagctggccggtcaggttcgggttttcaagcgccgctgttttcaaaagccccgttaagccgcaaaggagctgcgtatccgcttcttgaggcacgacaatctgaatgagctcgcgcccgccggaatttgaagcgaggattttcttcacttcttcgaacgcttgaagcgcacaagcctcaaaccgttcgtcttcactcttatgctgatcacggagcacatgacagctgaagtctgtctgtatgctgttcatttgatccgtaaaccggtcagatatgatcacgtgacgggctttgaaatggatcggcgctttttcatgtacagcggccttctcttcccatacgtgttcaaaatatagtgtatctgttttatccgtttcaatttcccgtgcggaataaccagttattttcacacatacattgccttgttcgtcacatacatcaatatccagcttctgcacggcatcttcaggcttgctttcgccgctgtacgcaatggatacccacatatcgcttttacagcttttcaacacatcaatctgttcgagagcaaacggcagcatcgggcgtatgtcagtcccgtctctgtcaagcattaacccgattgtcgcgtggaaggccgcatccaaaaggctcggatggaggacaaactgatcttttgtatgagaaatagatgacgggagtaagagcttcgcgagcactttgctgtcttttgcatagatttccgtgaccgctttgtgagcatccccgtattcaatccccatttgtttgtatgcccgatagcaagcgtcaggtgtgatcagacggcgtgactctcttaatttgtcaatctcgattttggccggttcgcccgctcggacaaacgccgcgcttccttgcgcatagagaacgggctctagttccgaggaagccggttcactgtaaaccgtaaatcccatctccccattttcttcgtcataaagacggagatacagttctgcggactcatccgccgctgtaaacggacgtatccatacgacatgtttcagacggactgttccttcttccttcgtttctgccgcgtgttcaacggccgcccgaaccatttccagataagccgcgcccggtaacgtccgctcgtttttgacgacgtgatcttgcaggaaaaattctccgccgctaaacgcagaccgaaaacggacgcctgacatgtttgatacattttcatgcaggagcggatgcagcatgcctgcatttttttgcggtaacgaatcttttttctccgcctcgggcacccaataccgtgttttttcaaacggatatgtcggcaggctgatccgattcggtttgttttcaccgtataagagattccaatccattgttcctccgccggcccacttttcggcaatcatctccagacttccggaagaaagccatttatgtatcaagtctggagcaagctctgcctgtttgcttttatcagctcggttccgccagcacccgctgaccgttttacctgccagaaagccttccagccgctctttgagctgtgtcatattctgagcggtgaacgcaacccgctcctccatctgttcacggccgatctgaagtgtatacgccgcatcctcaagcggcaggccgggatgaataaatgcagacagcttcgcaacgtactcttttagccgttcttcattccgggctgaaaccggaaaaatgaatgtctgttctcctgccggttcagcatttgttccgagtgattcttccggaataaattcttccagaatgagatgcacatttgaacctgtcgccccgaaagaactgatcccagcacgccggggatatacggtttcgtttccgttttccttcactgaaggctgctgccactcttcggtatgatgctggacgtaaaacggtgattgttcaaaatctaaatacggattcagctcctcggaatgaagagacggcaccaaagttttatggtgaagctgcagggcaaccttgcttaagccgctgatgcccgccgccgattccgcatggccgatattggacttcactgatccgatcgaacagaactgtttgtcctgtgtgtactggcggaacgccttgacaaggccttgaacctcaatcggatcgccgagagaagttcccgtcccgtgcgcctcaatataactgaccgtgcgcggatcgatgcccgctttgtccaggcattcttcaatcaaatcggcttgagcgacagggctcggcacggaaattccgctcactgtccccacgtgattgacggcactgccctttatcaccgcataaatccggtctccgtcttttaccgcctcccgcagcggttttaataaaacggcaccgattccttcagccggtacatagccgtccccgtctttcccgaatgtatgacaaactccgtctgttgaaaacatgtcccataaaccgtatgtcagatatttattcggatgcagcgacaagttgacccctccggcaaccgccgattcacattccccgcgccgaatgctttccgcagcaaggtgaaccgcagtcagcgaagatgaacagaccgtatcgaccgccatgctcggcccgtgaaaattgcaaaaatatgaaactctgtttgcgatttgcgcataattaagagaaagcgggaatacatgatcttcagaagaagcttcagccccgaccaacgtataatccttatgcatcacccctgcgaagacgccgacgcgctgtctcttattccgtccgcgcgcctctgcgagcgacttcggcgtatatccggcatcctcaatcgtttcccagcatgtttgtaaaaacagccgttcctgagggtccattgtttcagcttcccgcggtgtaatccggaaaaattggggatcaaagcaatccggatcatcaataaatccgccccattttgaaatgctcttcccggaaggcgactttacattttcaaaccggcgccagtcccatctagactccgggatttcggtaacacagttttttccttctttcaggttttcccagaattcatgaatattttcggcctgcgggtagcggccggccatgccgataatcgcgatatcttcaacttgcggaacactgcttttccgccttttttctgtttgcgtctcaaccggcttctccatttttgccggagacgcgctgaaatggctcccgtactgctcagtcaggaaagccgccagctctgctgccgtcgtatattcaaacagcaaagtcggagaaagggtttcgccgattttttcgctgatcgtttcgacgacgtcaagcagtccggacgatgtcagccccatttcatagtagccgacttgagaatcaatctgttcaagcggcttgccgattttttccgccatcagattcatgacataccgttctgcttcctcatgcgggtgtccgccttcaagcgatgccgcaacttccggtaaaccggctttttcaggagacttctcagcagtctttcgttctgtattgatcagctcggcatcccgcacgagcttgcttgtgaaatctttcagctcggctactttccggccggatgcgttaaaaaactccagtgtaatgtaaatgagctccttttcctgccgaagcgacgaacgcttgattctcgtgatgcagccggcctgcaaaggttcagaagctgtaaaagattcgtagaaaagaggcagaaacagcctcttttccccatttaacagcgatgagatcaataggtttgcgccgacgccgcttccgtcaagaagagtcggatggaacaaaaaccctccggcctgtcccatcgcgtcttttccgagcgatacatcaaaggtgacgccatcccgctcctcaaaaacttctccttctgctttcatatatccgctgtgaaccaattcctggcttctgcattgtgcatacagctcatttaaattgatggtgcgttccgcctcgcgtttgacagagtcaagatcaagcgtgtcactgaaaactgcgggtgccgtctcgtgcatttccgctttgacgtaaatgcgttcttccggctggactcgtccgccgctgacctcagccccttttgcggtaagtttccagcgccctgcttttacctttgtacattcaaccgtaagcttgacggcgctgtcttctttcgcaataagcggctgatatatggataaatggcgcagctgaagcccgtcgtatgaatagccgcgctctttgaaaatctgataaaacatatcaatataagccaatcccggaaggactttttgtccgtaaacgtcatgatgtaaaataaacggatttttcagcgataaagtgatttgcttattgaagttcttcacgttaaacctccacttcataggtatcccagatgtttgccgcagctttttcgttcgtttcttctttgctgtccggcgaaatcagccgcttatttaatgcaggcggtgttaaaggatggcgcttgattcggcgcccttcgtcttcctgccacgcttccacaataacgtgggcgtttgttccgccgtcggcaaagcagttaattcctgccgccggtattggtgacggccagtctgccagagtgcggctgaactgaatattggccttttctctatcaaaatgtgtattttcgtgctcacctgataaaaacggaataaagctcttttctttcagcatgagaacaacttttatgaaacttgcaattccttccgcgcaaagcgggtgcccgatgttcggtttcacagatccgattccgagcgggccggcgtcttttgaacggtagacggattgaatggccttcagttctaacagatctgtcacgaccgtgcctgaaccgttcgcttcaatatgagtgatgtcttccggctgttttccgcttttttcaagagccgtcttcatgacggatttttgcgcttccagactcggcgtagccgggcctgccgttcttccgtcattattgacggatgccgccttcactacggcataaatagaatctccgtcttcaatcgcctgcgacacggtttttaaaagaaccattccgacaccctcgcccagcacgactccatcggcgcgttcgtcaaatacatggaacgactgcgctttacttaatatgccgcgctgttcaaataatttatgggtttcttctgattcaaacaggctcaccccgccgacgacggccgcttttatttctcctgttacaagagcctgcacggccatattcatgccgactaaagcagaagaacaagccgtatcgaggacaacactcgggccgcgcatatcaaaatattgagagagatttgcggccaaataattctggcccagcgcgacgatcgggtttttcgcatccagcagtttctcttcacccggtctgtgacggctgcgtccgccgagatacacacctattgcttctccctttatctcatccggcgtatagccagcgtgataccacaggttaaggcattcttccagagcggccaaagcttgagggtccattgcctttacatcttcttcagccagtaaaaagaagtctggatcaaattgatgaattccatcaagcatccccgcgtaataaggcgtcttcaacccccatcgctcagccggaacaggaccgatagccgaacggccttcagccaaaagcgaccagtacgcctctaaggaagccgcccccggaaaccggcaggacatgccgacgaccgcgatatcttcccggtgaatctgttttccggccgcctcttcttgcaccttaacggcttgtgtttcaatcaccggctcagccggcttcttcttaacaggctccgccgccaaatcaaaccgttctgacaaaacttctgtatatccttcgagaagccaatttgcgaaagattgaatcgtcggatattcatacagaatggacgggtcaagcgatgccgagagattccgattgatccgctgcagaagctgagcaagaataatggaatccactccgtaatcctggaataatacgtctgtctcaagctggtcctggtcaatccgcagctcttcagaaaataattctttcagccattcttctgttttctttgttaattgagcgttgtctgcggcagcataagcggttttttccgccggttttaccatagccggactcattggctgatcctgcctgctccgccgcaggaatcgctccggcttccacagcttaggattcagaacggccggcagcaccgggccccttgctgattcaagaagtatgccgtcaaggagctgtaatccttctgcattcgtgatgctgtatagcccgctctctttataagctttgttcgttacttcgcccattccggtttctttccagttcggccattgaatgcttacgatcggcagctgctctttgtataagtttgcaaaatagtccatatacgcattggccatggcatagtcggcctgtcctgccgaaagcgccggtatcgcagctgacacggaagagaacaagacgaaaaacttcagcggctcttcgctgagcacactgtataacgcctgaagcccgtctactttcggctcgagcacgcgctgtatgtcttcatcggtttttctgatgaatgcgagcgtctctttatcggtcacacccgcgcagtgaatcacgccgccgataggtccgagcgtctgttttatctgactcagttcctgtctcagcccggcttcatcagctaacgggactgacaaaaccttcacttgtacacctttggattccaagtcgagaacagcttcaattttcgcttttacagaagccggcaccccattcagtccgcccgtccactcacttcgcggcggaagggtctcacggcctgtaagcaccagttttttcactccgtaatgttcggcaaaatggcgtgcgcataaaaggccgatccccctcgtacccccggtgatcagaagcacatggttgtccggaaaatcaattctttcacctttcatatccatgttttctgagccgcttaatacagcgcggtaacgcaagccgttcctccggcaaacttccgcgtcatcagtacgggcatgaaactcatcggcaatctgcttcgccagtttgtcatccgaaagcgctccttcaaggtcgagatgccttgaagacagatgaccgtactcgcatgccagcattctgtacagaccggcccgttttgctcctgttgtttgattggcttctttatctagtgactcaaggtctttcgtgacacaaagcagtgtgatcccttctttatgcccatgctcaatcaactgctgaagccatttgattccggccatgtcttgagaatcttctttcgctgcgccgaggaggtcgatgactccgtcaaacgcctgccagtcatattcaccggtaaggtctgatgctgtgatgatacggtgattcggcatatgcgctgcgatctcttctgcgagattgatcgtgtccccgcctgtcaaaatcgcaacggaacgtgcccacggttcacgcagttcgagcgggctcagttcccattgtttcgtcaaaatacgtttcatccgttcctctgtatggaccttatttttgtcaggattctcaggcacccaatacgtgtcttttgcgaacggataagacggaagactgagtaaacgcggcgtacccttttcatacagccggttccaattcaatacgccgcctttcacccatacctctgccagcttggcgaatttgccttttttaatccaggcgtcaatgacgatgtccatatcttcatctgccgtgaacaaggcaaacgtatctttattgcggtgagactggccggtatacagcccggcgatgtttttctcatttttcgtaaatgcttccagctttgtttccaattccgccatcgtcgctgcaagaatggccaagcgctcttccatttcgtcccttccggtttgcagcgtataagcgacgcccgccaagtcttgatctgtatacggcgtttgacggatcgctttttgcagctgttgcgcctgttcaaacagtttttcttttgatttggcggacaaaaggatgattgccggattttccgggctgtgctcaggctgagcggctgctttcgggacatactcttcaatgacgatatgggcgttgaccccgccgatgccaaatgagctgaccccggcccggcgcggaatggcatttccgtttctatcttttgctgccgtccattcctgattttcccgcacgatgtaaaaaggactgtcatcaagctgaatgtacggattgatcgtctcgcaatgcaggcttttcaccagcgttttgtgtttcatttgcaaaagcactttcatcacgcctgatactcccgcggcaagctctaaatggccgatattgcttttgaccgaaccgatgccgcagcggtgaccggagacttcgggctcttgatttgttttcgccagctcgtgaaacgccgctttcaaaccgtttatttcaatcgggtcgcccaattccgttcctgtaccgtgcgcttcaatatacgtaacggtgctcgggtccactcccgctttccggtatgcttttaccaataaatcagcctgcagtttcggattcggcgaggttaacgtattcgcccggccgccgtggttttcagccgtaccgcggattacgccgtaaatcggattgccatcacgttctgcatctgtcagtttcttcagcatcagaattcccgcgccttctcctctgacatacccgttggcatctttggagaaggttttgcattttccgtctttgctgagcatgcctgctttgctgtagctgatatgcgcttcttccgtcagaatcgtattgattcccccggcaatcgccatgtcgcattctccgttttctatagcggataccgcccggtgaatcgccacaagcgagcttgaacatgccgtttcaatcggctcgctcggcccgtgaagatttaacaaatagctcaaacggttcggacctatggaaggaatcatgcttcctgtcgccgcatgtccttccggcgcaagacctgcccttgtgaacaaatctttataaccggtatttccggtgccgataaagacgcccgtatttgtgccggaaaggctttccggcttacagcccgcatcttctatcgcccgccatgcataagtcaataacagccgctgctgcggatctaaatattgggcttcccgcggtgaaatcccaaagaacagcggatcaaattcagctattccgtcgataaagccgccccacttgatattcgttttgttcccttcaagattcgggtcgccatcaaacgcttgccaatcccagcgttctttcggaatggttgtgatcgagtcctttccttctttcaaattgcgccaaaattcctctatatcctttgcacccgggaatcggccgctgattccgacaatggcaaccgggtcattgccgcgcggctcttgtgtcgctgccgcagcgttcattaccgttgcgaagcgctttttccgctgcattttcggtttttgggcttttggctgcgctttttccggagactctttcttcttttcgccgaaatggcccggatgctcttttgccaaatatccggcgagaccgctgattgttccgtactcaaagaaaatcgtcggcgccagctccagctgatacgcttcatttaattgattcgtaaagacggtaaacgatacggaatcaaaaccgtattcactcaattccgtatctgtctcaatgtcctcacggtctacttttaaaatgccgcttaccatggctgtcaaagcggtctgaagcgtttgaagagattcttctgcatcgtgtttttcttccggctgagaaggaaggccggcttctgcctcatccgtcaaatactctgctaaactgcggatcgtcccgtgttcgaagaagatcgtcggcgccagttccagctgatacgcttcatttaattgattcgtaaagacggtaaacgatacggaatcaaaaccgtattcactcagttccgtatcaatatcaatctcgtcttggccgacttttaaaattgaactgaccaatcggataagcgcaccgtgccatttgtctcccgaaacggcggatacaggctcaattttctccacctgcggcttttcagtttcagaaacggataggaacgactgttttaattttgctgcgtgtccttcagctgctaaaagctgcggcttttcctgagccattccttcataaaatgcagccaggcctgacgccttttgaagcggaaccatgccgaaagcttttttcatcattctctccgtctcgtctcccgcctgcataccgccatctttccacagcgtccagttaaaggcgaccgtttttccgtgccgaaggccactctccgtaagggattgcctgtaagcggcgtatgcatccataaacgcgttgccggcggcataatcagcctgcccgacattgccgagaacgccggaaacactggagaacaatacgaaaaagtcaagattgcagtctttgctggcttcatctaaataagcggttccgatgactttcggatcaagcacttccctgaactcttccttcgttttttgcagcaggaagcggtcttgtatcactcccgcagcgtgaataattccgttaagctttccgaattccgccgtaatctcttttatcagcgcttcattttcccgccggtctgccgcattcagctttttgtagacgacatttgcgcctgagtgctgaagcatagcaagctcacgctgtttggcttctgtcagatttgagcggccggtcagaatgattttcgggtgttttacgcgacctgcgatttcttttgcgaacatcaaccccaggcttcctgcgcctccggtaatcagatatacgccttcgtccttccagacgatgccgccccctgcgggatgcatttcttcccaagccttcacataccgtttttctcctttataacggatatgtttatcatgcggccgatgactgtcgtttttcagtttttgagcgacagccggcatttcgccgattgattccatttcgatgagctgacagtcaagttttccgtattccagctcggctgtttttaacaaacctgttaaccccgcaaacaattgctggctgccgtctgctgaaataacagtctgaatcagaatgcggtcctgccttttttcgctgatgatccgccggatgtgttcagcgattgtctgcgcaaagctttggaagcgttcagcggctgtttcaccctcaccttctgcaatcagcagttcggcgtctttcaggccggatgccgcttcatcttttatacggcaggcatcttcacaaagtatgatcaaatgctcatcagcatggacagaggctttctcggatgcggcggcttctttccagaccggtgcaaacaagaccttttccgagcctgatagccgctgagccgattctgcatcgccttcaagcactctcgtagagaatcctctcaccttcacgcaaagcgctcctgtttcgtcgaacaggtcaatgtcggctttctgcacggaatcaccggtttgatatccttcactgaagcgtgcatgcgcccgcatagtcggcgtgcatgctttgacgacttcaagatattccagtgcaaacggcagaatcagcttttgtccggaaaactcctgcataatgcagatcgtcgccgtctgaatagctgaatcaatgatgctcggatgaagcgtaaattgtccgttcgtgtgagaaacagaatccggaagctgtatgtccgaaagcacttctttctcgccgataaaggcggacttaatgccttggaaggcttttccgtggaacatccccctgctccggccttcccgataaaaggccgccggatccagaatgtccgctgtgcatctgttttgtatggcagaaaggtctgtctcaggatcttgttcagcctttatgatttcggcccgtccttggctgtgcagcacttcttcatcgtcagcgtttacgctgtaaatgtcatatgagatgatgccgtcttcttcagggaacagcgcaatatggacctggcgctcttgttcgtgaacgacgatcggtttcatccagatggtatgatggagcgttattctgtcttggtcttttaataagccgccaagcgcccgttttaccgcttcataagacatttccaaatatgccgctcccggcagcaccgctttttccctgaccacatgatccttcaggaaaaattctgagcctgtaaaccgtgagctgaacttctgaagggttaaatctgacgtattttgctgcacgagcgggtgtaaaactgagactccgttgtgtacggcagatgtgttcttttctgcttttttcggccagtacagctcctttgcaaacgggtagaccggcacgctgattcgtttcggatgcttgtttttgtaaagcttgtgccaattgatggcgacacctttactccacatttcacagagcttcgatccttttcctttcgcaagccatttctcaatgagttcagcgctgtcatcatcatcagaaagccaggcaatatctttcgcctgctgtttttctcctctgaagcagcctgttacagccggcttatcattgataaaatcggcaagctgccgcttcagctccgcagtgccgcttgtgataaaggccgcgcgctcttccatcgcttcccttccgacttggaacgtgtaggcaagatcagcgaggtcggcgtccgtttttctttccagaaaagccagcagctgttttgcgtactccttcaggcggtctttttttctggcagacaacggaatgatgaacggaccggcagcgtctgctgctttagatgcatccggatattgttcaaaaatcgcgtgtgtgtttgttccgccaagaccgaaagagcttaaagccatgcggtgcgctctgttctcacgggttaactctttcttttcttccgctacgtaaaacggagagtcttctaaatgaagattcgggttcggctctttgtaattgatgctcggcgcgatttcctgatgatataagctcatgacaaccttgatgcagcccgccattccggccgctgtatccaaatgcccgagatttgttttgactgaaccgatgccgcagtattgttttttatctgtatatcggccgtacaccgattgaagtgcggacaattcgatcggatcgccgagttttgttcccgtgccgtgagcttcgacgtacgcaatcgtttcgggatggatgcccgtctgatcaatgaccttctgaatgacctcagcttgtcctttgacgctcggcgcataaaatccgaccttatccgctccgtcattattgacgccgattccgcgtagcagcgcataaatatggtcgccgtccttaacggcatcagacgcttttttcaagagcacggcgccggctccctcaccgccgatcattccgtcagcatccgcgtcaaacgctttaatatgcccgtcgctcgaaaaattcagccccggctgatgaacatacccggcgcttgattccgtatgaagggtcgcaccgccgacaagggcgtacttggcttcgccggactgcaggctttgaaaagccgaatgcaggccgattaacgaagatgagcagttggcatggacaaaatagctcggccctttcaacccgagtttatgagaaatcatcgtcggaatcgtaccgctttgggcaagcacccatgacacgtagccatccggcgtttccagctgtgctgtcgtctcctccggcagcaggctgcggtaagagttcgtgctggcagacatatatacgctcgtttccggaatttctttggagatatatcccgcatcctcgattgccttccatgaatggagcaaaagcattctcagctgaggatccatatattccgcatctttcggtgaaaagccgaagaaaccgggatcaaacatttctttcccctctaaaactgatttagccggaacgaagccgggatgatcagccagttcttcagaaataccgaatcggcggagctcctcttttgaaaagaaggtgatgctttctttgccttctttgatgttattccaaaattcataatgatctttcgctcccggaaactcacaggatataccgataactgcaaggctgtcctcgtaataatcgggaaattctcccgccggatgctcccggtcttctgcattcactttcttttgcggtacaggagcccaaacggcttctttcggtttttgttcagcgatataccggctgatgtcttttatcgtcgcgtattcaaacagctccgttacactgaattcacaatccagttcctgcgtcatccggtcagtgacagtcacggcaagaagcgaatctccccccgcatcaaaaaagcggtcatcaagctctatatctttgcttttcaatacatcctgccaaatcgccagtaccgcctgctggatatgagatgatgaaaatgtttgtgtgtccggctgcttttccgtcagatcgcgcgcagcaagaagcttgcggtccacttttccgttcggtgtaagcggcagctcttcaagacggataaacgaagctggcgtcatataggccggcagcgcttgtttcaaatgattgcgcaattcctttgcagacggaagcggctctccgtttttccggatataaaacgcgcaaagcttctcatttccggagtgattgttcacaaccactacgctttcctgtacggccggatgggcattcagcctgctctcaatatctccgggttcaatccggtagccgcggattttgacttgggtgtccatccgtcccatgtattcaatgcggccgccgggaagaaaacgcgccatatcgcctgttttataaagctttgatcccagttcgagccggtggctgacgaaagctttatctgtcagctcaggcttgttgaaataccctcttgccaatccgtctcccgcaatacaaagttctcccggcacaccttctaaaacagggttgagaccggaatccataatatacacgcgggtattggcgatcgggcgtccgatcgtaagcgcgctctcattttccgttatacgctgcaccgcggaccagattgtcgtctctgtcggcccgaacatattccaagcctcgcttttcgtatcgagaaactgctgcttcaattgttcgctaagcgcctctccgccgcaaaggattttcactttttcttcatttgaccatccggaatgaaagagcattttccacgtaaacggcgtcgcctgcatgatcgtcggtttgtactcttgaatcagctctttcagcttccgtgcgtcttttgtgacttctgtcttacagatgttgcactccgctcctttgattaaaggaaggtaaagctccagggccgcgatgtcaaagcaatatgtcgtgacggcaagcagtttatcttcggacgaaagccccggttcattcgccatcgagattaagaaattggtcagcgcccggtgcggaatcatgacgcctttcggtttgcccgtgctgcccgacgtgtaaatgacatacgccagatcgtcaggtgtcactaaccgcttcagcgacgttctttccgcggctgtactttcaatatgagaccaatcgcggtcaatggcagttgtctgcacgcctccccagttcaaagagtgctctaaatcagctgtcgtcaggcacattgaaatcatgctgtcggcgatcatatattccaatctgtcagcgggataagaaggatcaagcggcacatacgctcccccggcttttaaaatgccgagaaggccgacagccatatgcaatgatcggtctgtataaatgccgatgagatcatcagggcctgcaccgtgcgcctgcaaatagagcgccagcttcgtgcttttttcatcaagctcacggtatgtcagctgttgctgttcatacacgaccgcacaagcgtccggcgtttctgccgcctgacgttcgaataattcatggaagcaggcatccggatattcacggcttgtttcattccaagtcttaagaatcatgtgctcctctctttttgtcatgagagaaacgttctcaagcggcgtatccggattcgccgtcaaagcttcagcagcctgtacaaattggctgaaaagtctggccgcccccgcttcgtcgaataattcggtgctgtatttaatcgtaagatccatgcctgatgcttcttcccacatttcaaatacaagatcatattccccctcctgatgaatgtcttttacaaactcacaggagaattccttgtattcatcaagcatcgattgatagcttgaatgctgcagaaagttctgatagaaaaaggcattgctgaaaacaggcgaaccgttctgccgggggttcgcatgcacatctcgcaccattttcggaaacggataaaaggagtgatccagtccgtccagaacggcatcctgcaccttttgaacaaagtcagcaaatgtttcttttcgtccggctctgctccgtatgggaagcatgttgaggaaatggccgaccactccgtcaaagcgttcttcgggtctgaccattgcaggcatgcctgtcacaatatcttccttatccgtatatttgcttaaaagcaccatgtaacagctcagcatgacggtagacaaatgaatcgaacgggatgcggcaaacgccgttatattattcagcagccgttcgggaagacggcgtgtcagcgtatcttctgtaaactccggaacactgctgtccgtgcgcgtcggcggaagctgaaggtcaggcagatcgcccccgagctgtttcatccagtaagcgcgggcagctttgctttcttcacccgccaaataccgcttttcccaagccgcgaaatcgggatgaatgccgggaacagcggccgtaaactcttcttttccctccagcagcgcctgataatgatccagcagactgtgaataaatgtaatggatgaaatgccgtcaaacacgatgtggtgaatgaccgtcaaaagataatgttcctcggcggattttgaaagcagctgcacgcgcagcaaaggcccgccttctttgacaaacggctctttcacttttttccgtatcagagcggatatttgtgattcattgacgtcagaaatatcttcttccgagaatacaaaaggatctgccgcttctatgaaatataacccgccgtctgtttcattcacggcgcttttgagcatcggatgctgctttaatacgagctgaaaagcctgtttcagtttctctttgtcgattccggatgtgaatcggaaacagagcgggacatggtatgcagtcgtttcaggcgacattttctgcaatgtccacagccctttttggacttctgaaagcgctggcgccgtttgccgtctctcccgttctgctgacggttcggctttttggggatgatgctccgctgacatgtttgccgctttttcagcagtataagccgctaaagcgccaatcgtcgggtttttgtgcagctctcttgccgtcagccggatgtgatacgttttttcaattgatctggcgagtttcatcatcttgatggaattgacgccaagactttgaaacggcgtatttggatcaacgagctcatctgcgatggaaagttcctctttcagaaaacggataaaatcccgttcaatatctttctcggcagaagcggtttctgaattgccgccttcttgcctgctattatgtaatgaatcaaattgcccttgttcgaatgaatgtttcagctgagtgcgctggattttcccgatcgccgtcttaggaatgtcttcttttgcgaccggaagcagataatcaggggtaacgccgattctctgtgtcacgtgctggtgaatgtgatgaagaagcttcgtcatgcggttctcatccaacggaacagatgtcacaaagaaaatcgccagctcatctgtcgtgctttgattcggccggacggcgcatgccgctgtataagacgtttcaatttccggcaattcctcaacggctgattcaatggcatggctgtaataattcacaccattaataatgatggcatctttcgtgcgccccgttatcgtgaggcggccttcacgcagaaatccgagatctcccgtttcaaaccagccgtcttctgtaaagacactctcatttaagtccgggcgctcataatatccgctcgttacagtcagacccgagacttggaagcggccgatttctccttcttccaccacttgattgcggtcatccgtaattctcatattaaatcccggtatcggcagaccgatctcgacgaaacgatcgtcgtcactcgtgttttccagtgtaaactcatctgagaaaataacgcctgaagacgtttcggacattccccatgcgggtcggatggcattagccggcagaccgtgcggctctaaaagctccataattctgcgtccgactttcgcaaccgcggcctccccgccgttcagcatgtaacgcatggaagataagtcccatttccgcgtttgaatctcttctgcaaaatcggcaagcagtccaaaggcaaaattgggagcccacgtaaccgaagcgcggtaatgatcaatcaggtcgagccattttaaagggtccatcaaaatggattcgctcggtatgttgatttcctcacatccgagataaacatcacgcagatgaagcattccgatgccgccgacatggtcaaaaggcatccagttaaacgtgacatcctcacttgtatagccctgcatctgaatatttcctttgaccatgcagatgatgttttcatggctgagcatcacggctttcggcgtgcccgtgcttcccgaggtcaaaagcagcatcgccaaatcttccggacggggatgatgacagtccgtatccatttcgtgcgcactgagatcttctgccgccaaagcgcaaaacccggaaagctcctgctcctccgcccattcagtcatctccggcagcacgtcacggcttgtgatgacatacggccgattcaacagcatccaggcgtctttcagtttttgcgtcccgctattcatttctgtataagccggagcggccgcaagcggaaccgggatcgctcctaaaaaaacacagccccaaaaagcaggaatcaactgggaattgtcactgagctgtaatatgacttcatcctgagccttcactcctgattggcggagccctttcacaatcgaaagagcgatctttttcaggccgctgtaagtctggtacactttggtgccgtcaggctgtatatatgtgatgcccttttgatctcccgctgccgcggcggttttgtgcaggacttcaggaatcgtcatcggctgatccgctgaaagccgcaatgattttccatagctgacagatggcttgagtaacccgcttgccttcatatcacttttcatagagctgcctccatttcaactgtatgtaagatgtatgtcttatactccgtacatcgtcgtgattcgttttttcacttcatcatcatgaaacgtctcatcgtgcatgattaactccttctcaatgacggccggaagctgctcgcgaaacggcgtcaccaagtgccttttcaatgtaattaaagagtttctcggtttttccgcaagctcacgggccaattcctgcgcatagtctaatacttcctgccgcggaagcaccggaaaaggcactcctcttttctccaggtcaccgccgcggtagtggccgccgtttaacagcatttcatggccgaggcttgccccaagcttctccggaacgataaaggtagcgcccatcccgggggtgaaaccgtatttcataaagtttgcggtatacacgctttctttgcttaaaatgacaaaatcactgaaaagccccatgacaaacccgcctccgattccgtggccctgcatggcggaaatgacggggatatcacattccagcgccaaagagtacatgcggtcttccgtaaacttcgtgatgccctgctgaatcctgagcaggccttcctgtgtgcctccggaagcaaagtaatggccatatcctgttaaaatcacagctttatagactgacgatttttttatacgggtgaatgcttccatcaatccatccgtcagttctttggagaaggcgtttttatgggctttatcctgcattgtcacttggataatatccggttcaatttcgagcagttcaactgcggcgttcggcatgatatcctcctaactgttctccgtttcccaaggaagccgccccgtttctgcataacggaagatggctgattggttatccggatctgaaaacatcgcttgattttcggctaaagcaatggatttcgaacgatgaacaaggtcgtttaaggaatccatgtattttttatagcggatgactgcttttttcgacagcgggcggaggcgcagcaaatgctttctcagctctgttgctgagtccgggacgcatacgtcacaaagtccccattcaagcgcctggcgtgccggcacgggctttgtcatgatcgtcatataatgcgccttttgaaatccgattctttgaattaaaaacggcagaacgcaggctggataaagtccgaataacagttcagataaactgaacgaagcactctcctctgcaatgacgatatcgcaggcggcggcaaaaccgacacctcccgcatttacttttccgcggacgcgggcgattgtgatgtacggcccggattttaatgccagccacaaacggtaaagcggctcctgcgattccgcatgctgtataccctgcctcattttccggtacatctcatcaaaatccgccccgaaacaaaatacctccggctgcccttcaagcactacggaggtcacggagtcttcacattcagaaagaacgtgcaggcattcctccactaaacgctcattaatcgtattgttggcttcaggccgatcaaaggtgatgaagcagacattttgctgaaaacggacgtttatcgtctcataggtcacgatatccacctgtatttccgatgaaattccgtgatttcttccaaatacaaacgagggcttccggtatgatggtctaaaatgttcggaatcatattcacatccaatttgacattccgggttccaaacttcaccaaaccgctgcctttaaacagttcttcatattcttccatggacagcctgtacctgttgttcaagtgctcttctattttgaaagaatgctgccgcgtttgtccttcaggcgtcacaacgccgctgtaaaattctgaacagcacccggagccgtacgaaaaacagccgatccgcttagaagtttcgaatgccccttggtcaatcgtgcttgcaagagccagtaaagaggctgcccccataatgtttccgactctttggcagtagcggagccccggctctactctggcttgaaaatcctgttcgatttcagcgtttttcgcttttgcaagcttgcgcatcatcgtccggtgggctccttttaccatgccgccaaacggtgtatggaaggctagatagtgaaacgtctctttgtagtcagcgcccggcacacggtttttgtactcgcgaaatgtctgttcacagcaatcgaggtaagacatcaatgacaaatcggcatcaccggcttcactgtccgggatcggacggcatgtatccatcacctcatagccgtaatagccgttggcgcccgcatccgcctgaaatacaatcggattttcaccgatcaataaggcgacggcacccgctccggcgctcggttctgcgtaagaccaatcctcgcttaacgcatctccgccttcggcaattaaaaaccgggaaatatccgtcgcgacgacaagcgcctttgctccgggggatgtctgcgacaaaataaaattaagcgccatctgcaagcccgccgttcctgaataacaggcttgcttcagttcaaataaacggcagttccggttgaggcctaagtaatcatgaatatatgtactgagtgattttccgaagtcgatgccggactccgagcaggtaatcagcagctcgattctgtctttttcagcctctgtcaatcggtcgataatcggctttgccgcgttaacgccgaatgtaacgggatcttcgtacggaagcgccaccgctttttctttcatcagtaaattctcaaatctggcagggtctaagtttctgtactccgccagctgcatgacatcaaggtatgctgtcccgccaaacacatttatcgcttctattccggcagccgccatgaacttcgcctccaatatgaattttgagtttccgattgtttcaccgctttatcagacagcctgtaccttttcataaagctttgccgccaattcgccgatgtttgacactcccgtcagctcaacacgcgggatctgcagtgataattcttcaagcatcatcgtgataatttcggcgcggtctactgagtccgcccccagatcaactaaccggtcttcctgcgaaagctgttcgccttctaaatcaggcaaaacctcgtagattgtgttctgcagcaattcaaagattctttctttactcattgtcagttcctccctgtttcatcttttatgaatattccatgttttcaatctatcatttcgtcttgtcaacacgtttgcaaaaatgaacctaacttctgattcaaaagcgaggccgtctcttccataagccgcaggccaataccatcggcatggcggtttttccaggactccagctccgtacctttcacccattgattgaaggcgcctaatgccgggccgcaatgaatctggaagtctaccttggcatccgggtctcctttaatcgccgaagcagaactttgcctgaaataccatttgaatatgagcgccattttctgtttcggattccgttcggcttttgaaatgtcttcattcgaataatgagccttcactttgtcataaatactgcttacacttgccttaaaatacttctcttctatttgtctgagtgtcttttcatcaatttcttcaattgagcggtgacgctgatacagttcatgcagcttagaggcgcgagtcggaaagaacagccctttctttaatacctgcaccttgctgcctgattcaaacatatcgccggccggcgcgtaggccgtgtcctgtacattcatctgctgcaggaggtcctttacgaggccgctcgtcgctgcttcaacggtgcattggttaatagatccggtcacaataaaatcagcgccgagcataaatgcggccatggcagcctcgggcgttccgattccccctgcggctccgatgcggacgggtttgccgtatcggtattttttcatcatgtcatctcgtaaacggatgatcgccggcatgagactgtaagcaactccgccgtcagtgtggccgcctgaatcagcctctacgcagatgtcatgcgcaacgggtatttctctcatcagacttgcttcttcagcggtaattttgttttcggctgcaagtttctgcagaatgtgatcaggcgccgggctgagaaacgcttccgctacttccggacgggacagcttggcgataatccgctgacgcgctattacttgtccgccggcaccgcgttttaaccccttagcgcgaaaccttactaaagcgggagtaaccgttaaaaacgctgatgcttccaagttttgaaccccatgcttcaataaaagatcaatcattttttcttctgaatctgtatgcttcatattatgtacaatatttatgccgaaggaaccgccgtcacgaagctcatgctgaattgacaaaatggcgtcctcgacgtgcgcgatgttcaaaccgcctgttccgaaaaagcccatcattcctttttcggccagtttgacgaccatttccttcgaagaaattccgcggtacatgccgccggccaagtaggcgtatttcaattgataatcgcgcttaaactcttcatttcctaaagacgccgccgtaattgagcttttcccagcctcagccgggactttgatttcatctgttatcggctccgcttcagccgtaattctttgaatcagccccgtcagcacttttccgggaccgatttcctcaaagctcatgttctttcttcccattaagaaacggatgctgtctgtccagttcacagatcccgttatttgtccggtgagtgtctctttcagctctctctgctcatagggtcttgccgtcacatttgaaatgaccgggatggacagcggcttaaaacggaaagattcaataaagcgtgaaaactcttccttcgcttccagcatgtatctggaatgaaaggcgccgctgacatttaagcggtgaaccatttttacgccgtttacggcttcaaaaacggatgcggctttttcaatatcttctttatatccggaaatgacaatttgctgcggtgtgttcatgttggcgatatcaatcatatccaagtgattttctcttaaaacatccgtcacctgctcatgggtcaggccgatcaccgctgccatgccgcctccttttgcgcggctcatcagttcgcccctttttttgaccagctgtaagccttcttcaaaatcaaaggcgcccgaagcgtataacgcgttatattcgcccaaactgtgtccggcggtaaaatccggtttcaagccggtctcttctgtttttttcaaataactgagggcattgacgacatagagcgccggctgagtgaattgagtctgattgagacgttctccgtcccggcacagctcctgaatggaatatccgagaatgtgatcggcctttgcggttaattcaggatagcggccgaacaggttctcccccatccctactttttgcgagccttggcctggaaaaacaaagctgatcatcttacagtctccttccgggcggtgataaaatgctgtcttctatttgctgcaaatgtgtttgttctttatgaaacggcgtcataatggcacggatgcgttcagccgatcctgcaggaagaatctgtttggcaaatgcggccaatgttccggaaggcccggcatcaatatacaatcctttttggcggctgtctgcgaattgaagcgcttcgcggaatcgaatcggctttcttacgatatcccagaaaaagtccgcttgtatatcggtctcagcctctccggtcgcactggagatgtacggtataaacggagtccggattgatttctgagctaaaaagcgcttgtacggctgttccgcctgatcaaccagcgctgagtgaaacccgtaagataccggcaatagctgatgaggaatctgcttttctctcagatcgtccatgatctttttgatatgttcccgctctcccgagatgacaaagtgagaatgatagtttacagatgccaattcactatgttcgccgagcagcggatcatcttgatataaagccggatcacccagtatcgcaagcatgctgccgttacggcaagtttccgtaacgattcgggcctgttccagcacgcattctaaagcatcctcggcgctcagcacgcccgacacagcggccgctgcatactctccgaggcttgctccgatcacataatcgggacgtatgcctctttgctccaaagcatatgcaagtgcgtactcagccatgaaaatggcaggatggctgaaaagaaggcggtcaaatggatcagacagacgattgcctgtatgatacatctcttttaggacagagtaaccgaaacggctgactgcaaaatcgtccaagtcaagcattttctgccgaaaagcggcgttatgtgcaaacagctctttccccatttgatagtattgggaaccctgtccagaaaacatgaaaacaattggctggttcatttgttctcctttttgctgcttatttttttaaaatattgatttgtgagtgtttcgtgatgtcgtgtgcaggtgaagtggtcgtgatgttgtatggctggcactattgtgtgagataagaattttgacttgcgttccgctacatggcgggtgaagcttcagtttcttttttgatgcggtgaataagtcctgtcagcacatggcccgggccgacttcttcaaattccatccgccctttgtccagcagaaagcggatgctgtcgttccatcgcactgaatggtcgatctgatcggccagaacggagtggattccgtcttgctcataaggtctggcatgcacattagaaatgacaggaattgatatagcagaaaaatgaaatgactgtaaaaatttttcgaactcttgttttgcttcactcatatatctcgagtgaaaagcgccgcttacgtttaacggatgaaacatcgtaacgtcttttaatccttcgaatacgcttttggctctttcaatgtcttctttgcgtccggatatgacaacttggtgaggagaattcatattggcaatatcaatcgtatgtaatccgtgcgtttgaagggcgtctgacacttgagctgcagttaaccccataacagcggccatttttccgtcagtggccatactcattaattcgcctcttttacggacaagctgcagaccggtaataaaatcaaaagcacctgctgcaaacagcgcattatattctcccaaactgtggccggccacataatccggctttatgtcattgtcttggatttttttcaaatagcttaacgcgtttacaacatataaagcaggctgggtgaactgcgtcttgtgaaggttggaatacggattctcaagacaaagccgtttcatagaatatccgagtgtttcatcagcctgctccgttaagtctttaaattcatcaaacaatgagctccccattccctgcttttgagaaccttgtccggggaataagtatgtgatcattttctcagccatcctttctcggattcagataagaagcatgttcaagttgatagtaacttcacaaaaataccatgtcaagttaatttatcctatgcgaactcctgaataatacctatttttccctgtcgaaaggcagactcagggctttcggaatagacgtaagcagaatgtcccatccggcctgcccggcgttctcttccgcaaactcccgttactcagccattcatcaccagaaatctagtaataactaccatttcatttcagaagttccttatctcaaaagaaaagctagttagatagaactaaattacacattacttaaaatgaaacagccctttttgattttttctgttgcggaaattcacaaaatgttcttttttttcaatctgaaagtaaatattgtttttcaaaagactctccattttttgacccggcttctccccgaaggagtgccccggatacacacgcacatgcggcggaatggaggctttgatcctctgtatactgtgaaacatatcttcagctgagctgcccctgtcctcacatataccgcacccttctgtaaacacggtgtcaccggtaaaaagatgatcagatagcaaatagcacattcccccggccgtatgtcccggggtcaatatacttctgatgataaaccctccggccgcaaaggtttggccgtcttcaagcgctattaagtttctgcaccggaattgatagaaatcgatttctgccgacgacatgtatatatcagaatgatagatttgctgaagcggctccgccaagtttacatggtcataatgcgaatgtgttaataaaatagctgataaatcaacatccaattcatgcagtttatcggttattttatcgatttcccaggacgggtccaccgctatcgcagatttttttgagcggtctgcgataatataacaatagttggaccacatctggtgataagttttaatttgatgcacttcatatgtatgatccattgtcaccattcccatttaaaagatccgggcagactgctgccgccgcccagccgactgtaaccactttaccagatgacaccacgtttttccatggattttccggtaaagataaaaaactgttcaaatcaaccaaaagaaccagccgaagtttttaaaatttgttatcgtagtatataaggaaataaaaatattcatttacatgaatactttaggagattttattcagaaaatgaagaatggtataattttcggataaaaagaaagaaaaacaaatcgagtttttgttttgaaaagaattgtctcgaagcagcctgagaggatactcagtctttaaatgacattcaatcttgattcttatttcaatccttttcttcaagctaaactaaacccatacggcttcctcaaaatatatcagaataccttagctccttacaccgaatttcaatgttatgcttatgtgttggcattaacacacaattcaaaattagaaaaatacgacgtaactcacacacaagatgttgtttcttcactttcttggaacagccggagcattctcccctgagtaatcttttatgctagagataaagcatcttctggaccaaatggcacgtacgccgcttgatggattacttaaactcttatgttttccctttaaacgggactattgttggtgattatcaaatttaacctgtgttaagctttagacgggaggtaattatggaaaataaaagaaacgctgaaccgagcccaaaagctataagaattctaacttatattattcctatagttttaatagggcttatccttgttcttaagaatattaataccgcagcagcagaaatttcattttatattgttgctgtcggtgtggttctcttagtggttttcagtttgatcaaaaatagaaaaaaccgcaggaagaactaaatgtaagggggctaattactagccccctttgactcttttagattgtcagctcaccaaattccaatttgatttaaattcttcccccatctcttcccatgagaatcatcttgctcttttaagagatttttcacaagtaacattcaatgaaaaattcgggaccatccaaaaagaccccttgctttttttattgtgcttccaggttcatcttcagtgacagcaaactcttgcaagtatggaaatccttcctcttttgttttaagatgtttatgttcgaagataggagaggagatcattatggctttatttattgcattgtttggtggtttcatggttataggggcatttattggggtaatattgctggttccgggaaaaacaagaagaactggacttcggctatctcttacatgtatcgttatattactttcaatagggttcattaataagcattttcttaaatatgaagatgaacctattgcgaccattacgccaggcgaatataaaaaaataagagaagatatgacttatgatgaagtcaaaaaaattgttggcggaaaagcgaaatctgaatataaaattaataaatattcatcaccagattatgattttgatggagaggacggcttggaaaatgatgcaacggtatctcttcattttgttgatgataagttaagtgtcaaaagtgaatatgggttaattactaaaagtgatcaatcagaattagatgactcaccgtatgtggatgtaacggaaaaccccgaaaataaaattaaagaattagtaaatgaacacctacataacgtttctgtcgaagatattgaagtcaatcaggatcttggaactaaagaaaacggtcaaaacattgcactggttcacttgtcctttgatttaaaaaattcattagcaagaactaagaaaatgattgaattatatagtgatgatttagctgctcgcacagcaatagaagacaaaagcgttagtgaaatctctgtattttggaaagctccatacatagacgaaaacgaaaccctagcaaaagtctcttacaaaagatccggtgaaaagatgaaggtcagtgcgagaaactattctcaatctttaagttattaatcaatttaaatgaaaaaagccctctcattaagggaggctttcgttccttcgtgttacgatgaaatcaacaacaaaaccagtcgtaccaagccctctcggcaaatttgctgaggggctttctgctgttttcggaactttgaaaagcggtgtttgtttgcagaagggggatcgccgttctccgtccgtttccctttcaaagatttgttagcgggagggtcacttgcccttgctaccgtgagccttgttgtgacaggcgttacacatgtctaatcgtttcgaccaatctttctttacttccacaatatgatgcaccatgtcagccggggtgaagcaatgatctttcaaacaatgctgccagagataattgtctcgtatcaaagcaagttgtcttgttcgtttccattctgttgatttatataaacttatgattgttttggaatgtttgttgtaattttttgtttcttcttgttgttgtgtcttatgtgtatcacagtaccggtcactggtgaggctagggtacccacgggcagcgcatattttcagtggcttaaggggcatcaatcttatcctctgtttcttcttttatagttttccaataacaaaataatcgattgtcggttatagttaataatttcacctttattacaatgttatttaataacaacatacattttgttaaatgcacaatgttttaatatctattcatctttatctatttctcttagttattaaataaaaggatagtattctaggattaggtgtaggattgtgaatagtgattatccattgatcactacggttgtgtataatatcattgaaactttccatcgcataagcaggcaaatagtctgaaatagaccaccctgcgcttatagctctgctacctgacccatctaaacgtattgcaagatacgcatttccaggaacttgcgttctttctcgccatagccaaaggtcaaaaccatctccaagatcttcatgacgtgtgtaatcagatgtatataatgttcctccatctacaacttgcctttgttctcggttctgcttatgctgtatgagtggttgataaaccgggtacccataattaggaacataatttgctcctgtactataattttgatttaaatgcatcagaatcactcctcaattaattcgttttattttatgacaagaatctagacaggtgcatagtcaatttataaatatcaccataatatccttttttacatctgtttattctacgcttagaaagtgtcagtcgccaattgtttcacctaacggatgcagtttacgaagaatataaaaaagcaccccacaggatgctaaatcttattttttaacattttatctaaaaaacttccttgaaaataattcaagtttgcagagtagtatctgaaacttgatacagaaataaacaatattacaagttgtataattaacatagctattaccatcggcgggtaagaaaaagagccatacttatacagagttgctatcactgtaaacaaaacagctaaaaaatgacttacaaatacagtacccaaggcatgaattgttgatagcaagtacctataccttccaacgatatagtttcttttatcttcttctttaatctttaataaattttcatgccataaaacctcaaaataaaaataatctttcttattgttatctgcccaattgtcaggcttgggaaaattctcaacctgcttaattgctttatcaaaaatccggtttttattaaatatccaatttgctacaaagtataaatgatgaattatataacctactaccacgccaaatatactcagagaaataaaaacacctattaatttttctagcccagaaaactttaaatgagctgatatatagtcggtttcagtgagtacaaaataggctcctatccaaaaaatcaacatccatccgggtataccccatcttattaaatactttgtttcaaaactcatgaaatctcctcccaccctattatcggtaaaaagaaggaacaatggaaccattcgcaaattttgtcgaacgatttaccaaaattgtctgcagagaatataaaagaagcgactccgcttatcagcggtcccgcttcttttaatttattgcatactactataataccttatgtaaaacaaaatggtatgccgttattatgccaagtttctgtcaaaatcgttttagtacattcctttttgctctgcagcagtccctcccgccgtttgatatagaaaatgcattccgggtcccttatcggctgaacaaaattcattccggcgcgcccccgtccttatagacttccacgcgaagagcaaaggccagccgataaaatgcttttgctttcgttcggataacaaattttgtaagtgaacaactcggtcataccgatgtgaaaatgaccgctgatgtctatattcatatcacgcagaaccacaatcaaaagagcattaatcggtttgataaatacctaaacagctaaaatccgtgggcaaaatgtgggcacgaggggtacatcccacactgaacccttctacatcacacgcttaaacatcttctccatctcatacgtactgtgatggataatgatcggccggccgtgcgggcatgtgaacgggtctgtcgttcggcgcaggtcgtccaagagcgctttgatttcgtcgtttcgcaaatggcggttcgctttgattgagcctttgcagctcatcataatggccgcttcctcccgcagttttttaatatcgatctgtttggcgtcaagcacctgctgaatgatttcttcaatcagttcagcttcttccccttttggaaaccaggcaggatggcagcggacgatgtagctgttcgtgccgaatgcttctaaaaatactccgacgctttcaagctcatgctgatgctggtcaatgatcagcgcttcatttgccgcgtaatgaaaggtgagcggcacgatcatatcctgcacttcaggctcgacctgcccgactttctcccggaaatattcgtatttaatccgttcttgtgccgcatgctggtcaatgatatacaagccgttttcgttttgggctaaaatatatgtcccgtgcatttggccgatcggatacatcaccggaactctttcttcccgtatttcttcagagacagcttccggttccggaatatctgaaacaggcgctgccgtttcgggcataccgagctccggcggcactccgtgatccgcttcattcgggaggatctcttcttctattattaccggctcaggctcttttacgaccgaactcagcttcattggtgagtaagacggctccggcgttttttcaggaagtttccgctcaggcgcgctttcctcgaatgtcataaattgctgttcgtttttggccggtgccggcgctgattttttcgggagctgggcgctcggaataagccgctgcttttgaaatacttcctttatcccgtcacggatcagctcatgcagctccgtctctttgctgaggcggacttcaagcttcgacggatggacattgacatcaaccaaaatcgggtccatcgtaatttcgataaacgtaatcggatggcggccgatcggcagaagtgtgtgatagccctcatgcaccgcttttacaagcgggaaattcttaatgtatcttccgttaatgacagatgacatgtagtttctggatgcacgcgtgatttccggaagcgcaatgtagcccttgacttcaaaatcaagcgagctgacatggagcggtatcatttttttcgcaaccgccgtcccgtaaattgcggccagcacatggcgcacgtccccgttaccgtttgtctgcagcagatttttcccctgatggcggagacggatggatacttccggatgcgcaagagcgatccggttgacaacatccgtaatattgccgagctccgtatgcacggttttcatatatttcaatctggcgggtgtattgaaaaacaggttggtaacgataatctccgttccttttctgctggaggatttctgttcagaaatgatattcccgccctgaagaatgagatgggttcccgctccctcgccgatgctcgttttgatttccagatgagaaacagacgcgatacttggcaaagcttctccgcggaaaccgagggttctcacccggaacaggtcgttttcatctttgattttactggtcgcgtggcggcggaaagcccgcttgcaatcatcggtttccatcccttcgccgttatcgagcacccgaatcgacgaaagccccgcttcctctatgtcgatttcaatgactgtgctgtttgcgtcgatggcgttttccaccaattctttaacgactgaggcaggccgttcgaccacctcgccggccgctattttatttgaaagttcatctgacagctggatgacttttgccaagtccgtcacctctttctattttaattttttttgcagcttgtacatttcattcatcgcttcaagcggcgtcatatcgagaatattgattgacttaaaggcttcaagcacttgtttttctttattagaaacagccggtgccttctgttctttttcaccgtcagcaaaaaaggacagctgtgccggttcttctttgacggcgggctttttctcaggtgccgccggaagctccggtttatctcccgtctgctcaagctgtttcaaaatctcctgcgcgcggctgatcagatcgtccgggagctcggcaagctgggcgacatgaatgccgtaacttttatctgcggctccttctttgatttgatggagaaacacgaccgttccgttatattcctctgcgcgcacatgaacgtttttcagctgaggaagcttatcttcaagcaccgtcagctcatgataatgcgtactgaacagtgttttagcgccgatatgatcatggacatattcaataatcgcctgtgccagcgccattccgtcgtacgttgatgtcccgcggccgatctcatcaaacaggatcaggctgtcttttgtggcgttcacaatcgcgtttttcgcttccagcatttccaccataaaggtgctttgtccggaaatcaaatcatccgctgccccgattctcgtgaagatttgatcaaaaatcggcagaaccgcttcttttgcgggcacaaaacagccgatctgggccatgatcgatagaagtgcgatctgtctcatgtacgtgcttttacctgacatattcggacccgtaatcaggagcatttcccgcgaatcgcccatcaggcagttgttcgggacgtattcttgactgtccatcaccttttcaacgacggggtgtctcccttcaatgacttttacttcattatcagaaaagacgggctttgtgtaatgcctgttttcactgatcgtcgcaaagcattgcagtgcgtccagctcactcatttgttttgcaagacgctgcagacgcggaataaattgtttcaccttatcacgcagtccggcaaaaagctcatattccagctcgcagatgttgttttccgcttctaaaataagcgcttctttttccttcaattccggcgtaatgtaccgttcggcgtttgtgagggtctgcttccgctcataccgtccgtcctcaagaagatgaaggtttgcttttgtgacttcaatataatagccgaacactttattgaaaccgacctttaatgaacggatgcccgtataagcgcgttcctgctgctccagtctggcaatccagtctttaccgtttttgctggcgtcacggtactcatcgagcttctgatgatagccgtctttaattaaattgccttcttttaacgataacggcgggttttcatgaagggcttcttctaacaggtcaagcaaatctccgcacggatcaatcaagccggcgcgttcttttgcttttttatggttaagggaccctacaagctctttgatgctcggcacttgttttaaagattctttcagctggattaaatcccttgcgttgacgtttccgaatgcgacccggcccgccagacgttctaaatcgtatacttccttcagacgctctcgcagatcttcacgctcaaacagatgattgatcagcgtctcgaccatttcctggcgttcttcgatttgggatgccctgatcagcgggcggtcaatccattgtttgagaagccggccgcccatcgctgttttcgtctcgtctaaaagccaaagcaatgacccttttttgcttttcgaacggatcgtttccgtcagctcaagattccgttttgaatacaggtcaattttcatcgcttcttccaattcatatacttgaaccggctgcaggtgatccaggctccgtttttgcgttttctgcaaatacgtatataaacgcataaacgtctctgtcagctcttcgcccggcaagtgctttgcgatttcaatgcgttctgttatttccccgtcttcgatagaaatcgtggcgccgcaccgttctttcagctgagcagctgtatgttcgttaaacttgcttgatacgacaatttcctttgcgccgactgagtaaatttctgacatgacatcttcaatccgctcaataaatacggccaggttttctccggtcgttaagtccgataaagcgagaccgtatccgtcacggaattcggaaacggaagcgataaagttgttttccgactcgtggatgccttttccatccatcacggttcccggtgtgatcagctggacgacttctcttttcacaacgcctttagccgccttcggatcttccgtctgttcacagatcgccactttatagccctttttaatcagctgttcaatataagccgcggcggaatgatacggcacgccgcacatcggaattttatcagccgaacctccgtctctgcttgtcagtgtaatttcaagctcttgtgacgctttttttgcatcttcaaaaaacatttcataaaagtcaccaagccgaaaaaataaaaaggcatcttggtgctctgcctttatcttcaaatattgctgtatcataggcgtgtaactagccatcatttaatccctcactatgtatcttctcttatccgaatcccattataacataaacaaaagagtgatatctttatatataaaaaagagacttggggtgttaaactcccctagcctcaacttattcttcaggatctccgactaaaaattcagggttaatgtcctctaattcttcatcaagatcgtcttcccaatcatcatcatcgtcttcttcccagtcaggattgacttcgacgacgactttcgtttcaccgaccacttctgctaaaaattctctctctgcctgaaccacgattttatttccgttaggagaaatggtgacttcaagacagttcggctgctgcagcactttggcaatgacttcgtgttcgtcatctaagtaatttgtgtctctgtatctgagtttaatcacatcgacatactttactctctcggttacaacttccgtttttgtattatcggcgtaagagtaccagacgtttatatcataatacccttcaatttctacagtcttcccgatcttttcggcatcgtacttgtggttgataatccagccgcccaatatacttgacggtttttctccaggtgagatcgtgttggtgcattgggtgaattttcttcctttcgcaactaccgctttcgtaataatttccctgtattcagacattccggcaggcctccttgttcttcttcgtgttatcttatgctgggcatttgtctcatgtgcatttttataataaaaatataaaaatacaaagtttctgtttcattgtatgcagccctgcccagaaactttacttttaagtatgataaaactttccagtaaaatgggacaaaacagtgagtcaatgaaaatttagtacatatcacaattagttctcaaacagcaaaaaaacacgggccgatgaaggccacgtgtttaaatagaacagctgttattcgaatgttttacttttgaaccggtttctcccgtcagcaggttgcctccggtagatgtaatgatttcgtttgtcacctgatttgagatcgtatgtgcgacaagctgaagaaggtcattgacctcaatctgggaatctctgaattcctgaatgatcggaatcccttcaagctcttcctgcagggcgtcaattttactttccacttgtttcagcgcttcaagcttttcgtagtgcttcaggttaacggcttgcttttgcagggttttaatctgattaataatcgcagagactttttcattttcgttaatctgcgcctcggcgcgtttgaaaaaatcaacttcttctgtttcagaaatcattttcgcaaggttcctagcctgctgtacaatgtctttctttgagtaaagcgtcattattatttcacctcgattgcttctcctgccatcacaccgtcaagcgaccatgttttcgcctgttcgattttgacgcgtacaatcttgccgatggcgtctttcggccctttgaagttgacgagcttgcttttttccgtatagccggcaagaatgtcagggttatttttgctttctccctcaactaatacttcgacagtcctgccttcatattccttcatttttttggctgaaatttctttcaccaaatcattgagacgctgaagacgttctttcttgaccctcatcggaacattgtctttcatcttcgctgccggcgtgccttcacgaggagagtaaataaacgtatatgcgctgtcaaattccacttcgcgatataacgaaagcgtttcttcaaactgttcatcggtttcattcggaaaaccgacaataatatcggtcgtcagtgaagcgttcggcatcgccgctttaatttttccgacaagctccagatagcgttctctgtcatatttgcgcgccatcatttttaacatcgctgagcttcctgattgaaccggaagatggatatggtcaagaaggttgccgcctttggcgagcacctcgatcagatgatcatcaaagtcacgcggatgactcgtcgtgaatcggattctcggaatatcaattttacgcagttcgtccattaaatcaccgagaccgtacgtcatatcctcaaaatcttttccgtacgcattcacgttttgaccgagcagcgtgatttctttatagccttcacttgcaagtcttctgacttcctggataatttcctcaggacggcggcttcgttcttttccgcgggtatacggtacgatgcagtatgtgcagaacttgtcacagccgtacataatgttgacccagcctttaatttttccattgcggactttcggaaggttttcaatgacatccccttccttcgaccacacttcaataaccatctcttttgataaatatgcctctgataacagttccggcagacggtgaatgttgtgcgtgccaaaaatcatatcgacaaacgggtgcttcttaaggatgcggtttacgactgattcttcctgtgacatgcagccgcagacgccgagaatcaggtccgggttattttttttgagcgcctttaaatggccgagctctccgaacactttgttttcagcattttcccggatagcgcaagtgtttaataaaataacgttcgcgtcatcaaccgaatttgtcgcttcataaccgagcgccataaaaatacctgccatgacttccgtatcatgctcgttcatttggcatccgtacgtgcggatataaaatttcctgccttcaccgaggcctttaaattcttctgagattttaaaatcgttatgatattgaacggattctttgccccgttttttcgcatcttttaaagaaggcggaatatatacggcttcaaaatacttgctgtaatccttttcggattttttgtccgccggattcacttgtccgctttcctgcttttgcttttcattcatgttcgaatgtctcctttcaaccgaaacttccaccctcaagtatactggttaaaagcgtttggcacaaccgccagcctattattgtacaccttattgagaataagaatcaataagaaataaaaaagagggaatcatttcccccttacacgagctgaaactcttttgcggctgaacggattacttccagggcccggtcaagctcctcttttgtatgctccgccgtaataatggtgcggattctcgcttttccttgggcgaccgtcggatacacgatgctttgtgcaaagacgccgcgggtcaataaaaggtctgataatgcctgggctttttcttcctcccctattaatatcggcacgatcggtgtttcgctttttgtgagggtcagccccatttgaaccagtttgtctttgaaatacgccgtgttctcccatagcttttccatatgctccggctcttccagcaggacgtcaatggcttctatgcatgcggccgttaccgcaggcggatgagaagtgctgaataagaaaggacgccctttatggcgcaggtaatcgatcagaacctgcgaccctgcggcgtaaccgccaagcactccgatggctttgcttaatgtgcccacctgtatgtggactcttccgtcaagcccgaagtgattaaccgttccccttccgttttttccgagtacgccggaagcatgcgcgtcgtcgaccatcacaaaggcatcgtacgcctctgcaagtttgacgatgtcaggcaaaggagcgatgttgccgtccattgagaatacgccgtcggtgacgagcaggcgcatgcggtaattcattgattttttcagcaccctttccaaatcgtccatatcaacatggcggtacacctttttatctgctttcgtcagcctgatcccgtcaatgatggaagcatggttcagttcgtcagagatcacgatatcctcttttgtaagaatgcttgataggacgccctgattcgttgtgaaccccgattgaaaaacaagtgccgcctctgtttttttaaagttggccaattttttctccagctcattgtgcattgtgaatgttccggcgattgtccggacggaccccgtacccgctccgaattcttccgcggcgcgtttagccgcttcgacaagccttggatgcgacgtcaaaccgagataattgttcgatgaaagctgtatcacgttttcccctttgactcccaccgacggaccctgcttcgtctcaatttgtttcatttgctgccacgttttattttctttcattttatcaagctctgcttttagaaattcaaattctttcattatagaaccctccccttatggaatcaaaatgactttgccgcactggccctttctcatcaggtcaaaccctttttcaaagtcttcaagcggaaactgatgcgtgatcaccggcgtcagatcaacaaggccggattcaagcaggtgcgatacctgccgccatgtttcaaacatttttctgcctgtgatgccttggacggtaagtcctttaaacaccacgtcatttgtcaggtcaaccgtcaccggacgttccggcagactcagcatatggaaccttcccccgttggccgccatctttaatccttgtgcgatagctgccgggtggcctgacatttcgcaaacaaggtcgatcccttctccgcctgttaaggtatcgatcacctcaagcggatcttccttatcagctgaaatggtgatcgtggctcccaatttcttcgcaagagccagcctgtaatcatttttatcaatggccgcaatacgggatgcaccggccgctttagccactgccaccgccatcagcccgatcggtccgcagccgataattgcagcggaaccgcccgcaagccggctgctttccagcaccgtatgcaccgcgttgccaagcggctcttgaacagaagcgacggcggggtccatatcagcgggatttttccaaacatttcgagccggcactttgacatattcagcgaaggaacccgctgtatctacgccgaggatctttgtatgggtgcacacatgatgttttcctgttaaacaagggacacaagtaccgcagacgaagtgggtttcagccgaaacatagtcgcctattttgacatttgtgacgtgcttgcccgtttccgctacgataccgctgaattcatgtccgaatacttgaggtgttttgattcgtttctgcgcccattgatcccaattataaatatgcacatctgtaccgcatatagatgcggcctgtactttaatgagaacttcattctcatttatggaaggtatgggaatttctttcagagttgctccgaaagcgttttcatttttgacgatagctttcatctttcctcccaacatgtacactcctcctcgaaaaaactctgtaataactggattgtaacatgagataaaaaggaggtaaataccagtgtccactccaagaaaacaactgcttccgtccggaaaaatgggcatgatttttttgaatattatatgaataaagccatttatcatctcttcgtactatcaatataatattgtgagaaaatatgacaacaataaaaacaacccgctcgccttacgcaagcaggttgagaatgtcatgtttttgtttttaacggggttcgacgattaacttaatcgccgttctttcttctccgtcaatctgtatatctgtaaaagccggaatacaaatcaaatctacgccgcttggcgcgacaaagcctctggcaatcgcaaccgctttaacagcctgatttaaggcacccgccccaattgcttgaatttcggcggctccgcgttccctcaatacaccggcaagcgcgcctgctactgaatttggacttgattttgctgaaacttttaagatttccatttctgctcccccttagttttacaatggataagtgagtgttcattagaacaatcattattagatgttgctatccaaaaagccatccccacaatgcttttcaaaaatagcgggctaccttccatttttactatattcactaagaagttgctatattcctgcttttccttttaatatttttataaaataaacacatgatcacctattcaaagaacatatggtcatcattgattaatatccgttcgatatttacggcctttttcgtttgatcgtcgatgtcaatgagcactccgctcagcgtagttttaccttccgccaccgtaaaccggacaggaagattggttttaaaccgcttgatgaccgtttctctgtccataccgagaattccgtcgtacggacccgtcatgcctacatcagtaatatatgccgttcctttcggcaaaatgcggttatctgccgtttgcacgtgtgtatgggtgcctaccacggcagaggctcttccgtctgtgtaccagccgatcgcaattttttcgcttgtcgcttcggcatgaaaatcaataaaaatgtacggcgtgcgctttttcgcttcttctattaattcatccgctttagcaaacggatcatcaagcggcggaagaaacgtccgcccctgtaagttaatgacggcaagctcttttccgttcgatttaatataggtaatgcctttgcccggcgtaccttccgggaaattcgccggccggacaagatgcggcacatcatcaataaagtcgaagatctctcttttatcccacgtatggtttcccattgtaatggcatctgctcccgcttccatcaggctgtggtagatcttttctgtcagtccttttccgtgtgctgcattttctccattaataattgtaaaatgcggtttatgtttcgctttcagtttcgggacatattcttttaccatgtcgcggcccggggaaccgacaacatctccgataaataaaattctcatacattccattccttccttttcagggactcaaaaaaataaagtgatgcgctaagcatcactttattttgcatactctacggctcgagtttctctgattacggtcactttaatgtggcccggataatcaagctcgtcctcaattcgtttacggatatcacgtgccaaacgatgggcttctaaatcattaatggagtccggcttcaccatgatgcgaacttcacggccggcctgaatcgcaaatgatttttcaacaccttcgtaagactcggagatttcttcaagcttttcaagtctgcggatatagttttcgagcgtttcacttctcgcgcccggtcttgcggctgacagtgcatcagcggcagcgaccagaacggcgataatggaagtcggctcttcgtctccgtggtgtgacgcaatactgttaatgacgactggatgctctttatatttggtcgcaagctccactccgatttccacgtggcttccttccacttcatggtcaattgcttttccgatgtcatgcagaagaccggcccgcttggcaagctttgcatcttctccaagctcggaagccattaaaccggctaaaaacgcaacttccatagaatgtttcagtacgttctgcccgtagcttgtacggaatttcaaccggccgaggatcttgatcagatccgggtggagtccgtgaacgccgacttcaaacgtcgtctgctcacccatttcccggatatagtcatcaacctcacggcgggatttttcaaccatttcttcaatgcgcgccgggtgaatacggccatcctgaacgagtttatcaagagcgattcttgccgtctcccgtctgatcggatcaaatccggaaagaatgactgcttcaggtgtgtcatcaataatcaggtcaatacctgtaagcgtttcaagcgtacgaatgttacgcccttcacggccgatgatacgtcctttcatctcatcattcggaagattgacgaccgataccgtcgtttcggcaacatgatctgctgcacagcgctgcaaagcaagcgacagaatgtttttcgcctttttatctgcctcttctttcgcacggttttcggtttcttttgtcatgatggcgatgtcatgtgaaagctcattttcaacccggtcaagaatgatttgcttcgcttcatcccgtgtcaggctcgaaatgcgttcgagttctgactgctgcatacgaatcatctcatccactttgctttccatctcttcaatatgttgttgtcgttcattcagagaatgatctttcttctccaacatcgcttcccgtttatcaattccttcatgtttacggtcaagattttcttctttttgaagtaaacggttttcttgtttttgaagctcatttcgtctttcacgaacttcctgttcagcatctattcgaagtgtatggatttcgtcctttgcttcaagcagagcttcttttttcagtgcttcagcatcacgctttgcatcttcaaggatttgctcggcagcaccgcgtgcgcccgcaatctttgcttcggcaatggttttacgaacatagtagccaacaactaaaccgagcagagtcagcaaaatggagatgagaaccgtcattggggtcatactttcacctcctcttgctatgaacttggtttttgcttaaataagtgccggcatgtacattgtttgattttctcaacatacagaaccttcacagggaatgagtctctcatgcccttgtcaagtttaaatggtttaacaatcatgttaaaaaaacaaatgttacaacttcattgtaattgtgtcggaaatacttgtcaagcttgccagcttaacgattcgccttcagctcggatcttcgcccatgtatatatcataccataccttcatccgcttttcgtgaatgacggctctgttagtccccctggttaagcaattggtaaattctattgtttacctgtcctaatttagcgttattctgaatgtttgacagtaatatgacatatttgcttgctgaatggctgaagctgttcaaaatgttgtaaccgggcataacaccgtgattggaatagcttcccggatcaatgtaaaaccccatgccgtaagcggcactgcttcctgctgtaaacatttttgtgaagctttcttttgaaaggagcgtgccgtttacgatcgctttatcaaatttatagagattttcagcgctcatatacatgtcgcccgccccgtacagctgcgataagtccaaaaggtgcggcgttacaagactgccgctctcatcgactttgtagccgacggcaggatatttggctttggcaaatgttttgtaaaacccggcatgcttcattccggccggtttgaacacgtgttcttttatatattgttcataagactccccgctgacctgagatacgatataagcaagcactgaatagttggaatccctgtaatcccaaaccccgggctgccgtttaattccgcggtattctatatccttgattaaatcaattggagcaatcggtccctgcccctcaatatgcccgtttatgccggacgtatgattgagcaggtttttcagtgtaatgcgcgtgccgttaggaaaattcggcaagtatgtactgacggggtcactcgtctgcagcagccctttttcttcaagctgcaggacagccgtcgcgattaacgctttttgtgaagaaccgatataatatgatgtctccggattgtttttaattttttgttttcggtccgcatagccaaagccttttttcagcacaacttttccatcttttacgatcattgctgtgccgctgaacccgatctgttgcaagtaattgctgatctgtttattgtgatcgattgatttaggtgttttctctttttgcgtcttttcttttttctgttgagtctggtcttttgaagtatcagattgagcggcgggagcgtttttaacggattccttctcccggtgatgcgccgtgacggtccagatcataataaaaacagtaacaagcagcagaaaaagaaacagccctcccgttttcatcagcttcttctttctttttttatttattcttgtgcggcgggggctcgtcatcttttttcctcctcagatataatttcaactttcgccatgatgttagacgagtgaagtgtgaaaaaagttgtaacattccagataaaattttccgaaacagccagtgttttttgaaacacacaaaaaaaagagcggaaattgcttattccgctcttttgatcgtgtttttattcttctaattccatctcttcctgaacttcttccgctttgtccgttacaccgttattgtctaaaccgtaatattcacggatttgttcctgaatcatcagcatgatgtctttattttcttttaagaactgcttggcgttttcacggccctgaccgaggcgttcttcttcataagaataccacgaaccgcttttttgcacgatatccagttcagttccaaggtcgatgatttccccttctttggagattccttcaccgtacataatgtccacttcagccgtacggaacggaggagcgactttgtttttgacgactttaattctcgttttattccccatgacgtcgttgccctgctttaattgctcggcacggcgcacttcaaggcgcacggaagaatagaatttcagcgcgcggccgcccggtgtcgtctccggatttccgaacataacgccgactttttcacgaatctggttaataaagattgcgattgttttagatttattgatggcgccggaaagcttacggagcgcctgagacatgagacgcgcctgtaaaccgacgtgtgaatcacccatgtcaccttcaatttcagcttttggaacaagcgccgcaacagagtcaacgactacgatatcaacagctccgcttcgcaccagcgcttcagcaatctcaagcgcctgctctcccgtatccggctgagaaagcagaagctcttcgatattgacaccgagcttttgcgcgtaaacaggatcaagagcatgctcagcatcaataaatgctgcctgtccgcctttttcctgaacctcagcgattgcgtgaagcgctacagtcgttttacctgagctttcaggtccgtatacttcaataatccgtccgcgcgggtatccgcctattccgagagcggtatcaagtgcaagggaaccgcttggcaccgttgaaattcttgtatctgttttttctccgagcttcatgatggaacctttgccgaattgtttttctatttgcttaagagccatatctaaggctgcctgacgatcactcatttattttttcctcctttatcttgccactacatatactataccttgtttactggcatttgccaagaaaaaagcgaacgcatattcggattttttccgcgttcgcttttctgcaaaagagcataatttcccttgtaaaacttaaaaatcagagaaatcacctctttaaaactttatttttgatccagcattttcaaaatgagatggcagccgtatttagcggcgcgctttctgattccggttcttgagccggcaaagttaaattcgtggacctcttcttttccttccgccgaaatgccgataaagacgcggcccggcgcatgcccttcctgcgggtcgggacccgcaaccccggtaaagctgatgccgatatcgcttccggtcagctttctcacaccggctgcaagctctttcgcacactctttgctgaccgctccgctttctgcgagcgtctcagctttcacgccgagcacatgctgtttcacgctgtcggaataacagacaacaccccctgcaaatagttgagacgcaccgcttaaatcagtcacccactctgaaaacaggccgcctgtaaagctttcggcagaagaaatcgtgattttgttttgtctgcatgcttttgaaagctccttcaccagagacgtatcatcatatccgtagaaaaattcaccgacacgttctaaaatggcggcttccgtttcttttaaaagcctttctgtttctttttcgtcagcatgtttcgccgttaaacgcagcgtgacctcgccgtcagcagcgagcggcgcaatcgtcgggttcgtctgcgcatcaataatatcttctaaatcagcttcaagctgggattcaccgattccgaaaaaccgcagcacggttgaaacgattttctcattagaaccgagctttttaagaagcagcggcttcgcttcattttcaaacatcggacgcagctcgctcggcggcccgggaagcagcatataaagccttgagccgtgctctgcaagcattcccggcgccatgccgaaatgattcgccaaaacgtctgagccctcaatgacgagcgcctgtttgcggttattcggcgacatggtccgttttgttttcgcgaaatattcttcgatcgaccggaacgcttcgtcattcagaacgagcgggcgccccagtgtgtttgcaatggtttctttcgtcaaatcgtccttggtcggtccgaggccgcctgaaaaaataatcaggtctgagcgctcctcggcaatgcggatgacttgcttaagccgctccggattgtcaccgacagcggtatgataaaacacgtttacaccgatttccgccagctctttactgataaactgcgcgttcgtattggcgatctggcctagcagaagctccgagccgactgcaatgatttctgctttttttgctatttccatctttaagtccttctttcttagttagatgtttttaacgcatcccagttcttcgcaaaatactcccagccggaaatgactgtgaagagcacggccacccataaagcgatatcgccgaacgggaaagaaacgagctcaaacggaagattatgcagcaaaagcgcggcaacagcgatgatctgagcccatgttttaattttccccagcatattggcggctacaacttcccccgttcccgccagcacaagtcttaatcccgttacggcaaattcgcggctgatgatgatgatgaccatccacgccggcgcaaggtcaaactgcacaagcgtaattaatgccgcggataccagcagtttgtcagccagcggatctaaaaatttcccgaagtttgtcacgaggttcagttttctggcgtagtagccatccacccagtcagtcgttgatgcgataatgaataaaacagctcccgtaagatgcgcgaccggaatcgattcatcccctatatgaacgctgccccactgaaaaggaacaagcatgataatcataaatacaggaattaaagcgattcttgccagtgtgattttattcggtaagttaaacataaagcccctccaataatatgtactcggacgtgaagaaaaagtcatcttaatcgttcagatgactttttccccttttattttttcatcttgattgtgatggtctgcgccatcacatcatgcggattgagttcataggacagaacctctccgttgattttaattttcaggttaggggcatagcccgtgcggatttcaatctgcttttgatccgtgacgtcttttttaaaggtttcgcctttttgcagcgttccttcttttaaagaaccgccgctgtcatcacggacgcggatccatgcgctgtcagaagcaatcagttcaagcttatacttatctgccccggagacgttgtatgaagaagccgagccttccgttccggccgctttgatctccgtcttttcactgcttttttctttctttttctgctctgacgcttttgtgtcctttttgtcttttttactgtcagattgcgcttcgtcatttgtattgccgtcgtttttcagcgcagaatccttaggaatctcatacttgctctcactttgggtgacggccttatctccgtctgtctgcccggatttgctcattccgagctgaataatcgcataaatgatcgcgatgacgataatgacaccgatgacgacaaggacggtaggaagccattccgccgcctttgaagcggacttaggaagctctctttgcatggcaagacctgagattttttccgacacatcatcatggtacgtgttagggatgtcttttttatattcttcaaataattgatctgaatcaagcccgacagcttcagcgtattgcttgataaacgcccgcacataaaaattgccgggaatgacgtcataattgccttcttccagagcggttaagtatcttttctgaattttcgtcgccgcctggagttcatccaacgacatccctttttcctctctggcttctttaagccggattgctaattctgtcacaacaaacaccttccaatattaaaaatcaaagcttgaaaaaccggtctgatcaaacatttgcggttcttctgcatgttcatatgtaatgacttcgtcaggatcatttctgagttcgataatataatcgaaatcatcgagcgtatactccgaattttgaacaaaaatatcggggtgctccacgacctttgtcgccggaagccgcataatttcactgacgagctgaagatggcgctcagatccccgtcttgtcgaaacgatgccgtcgaggataaacacgttttccgtgctgtattcatcggcaaccagctggctccggatcgtttgttttagcagcgttgatgatacgaaaagccatcttttgctggcacaaacgcttgacgcgacgatggactccgttttcccgaccctcggcattccccggattccgatcagtttgtgtccttcttttttaaacagctcggccataaagtcaaccagaagaccgagctcgtccctttcaaaacggaaggtttttttgtcatcggcatcacgctgaatgtatctcccgtggcggactgcgagacggtcgcgaagcctcggttctctcagcttcgttactttaatggtctccattgtttttaaaattgattccaatcgtttaatttgatctatatgccggcatctgagcagcattccccttctggaaaggtcgacaccgttaattgtgacaatattaattgacagcatcccgagaagagatgaaatatccccgagcaggccggggcggttcacttgaatttcatattcaaaataccattcgagctttgccaaatgatataccccctccattgtggcaaatttttaccttcctttatcataaaacatttttctctaattagaaagaagaatgttgctctatagaggaaaacataaaaaaagagaggagaaatcccccctcttaatgagtgctgttattttcaacaagcttcaccatcatatttgcgatggcgcgctgttcatcttcagaagcaacgctccaaagatcagcaagcactttttcctgatggtttttcgagtcgacttcgttcgcaaggtaaccgccgatttctgtagcgaggtcagtgatcgtttcatcactcatccctttttcctgcgcatagttcaatctgtcgccaaggaaattcttccaattatcccagttttctaatactgacatgttgggttcctccatttcatctgttgttacaaaattattttgtccgtacagatgcaaactatacacacatttttttcagcagtgccagccgccgtttacggataatatatgccccgtaatataggaagccttgtccgataataaaaaggccgccgcttcggcgatttcctccggctttgccagccggcccgcgggaatttcctctgccaacgcttctttttcatcagacgtgaactgatcaagcatatttgtatcaacggcacccggcgagactgcattcacccggacgccgctcggagcaagctctttggcaagcgctttgacgaacgaatgctgcgctcccttgaccatgctgtataatacctcgcacgatgcccctgtttctccccagacggaaccgatcgcgacgatgcccccgctttttttccggatcatgccgggcaccagattacgcgccaaaagaaacggactcgtcacatgcagctgcaccatctcccgcgccgtgtcatccgtaacgtccgtaatcaggccgaaatgacttttgccgctgtttaatatcagagcgtccacaggctgcttaacggaacggctgagtgtctccgcgccatccggtgaggacagatccgcctgaataacggaggcttttacgccgaatgatgcgcccagcctttccgcaagcctgtgtgcggcttccttattagaatgataatgcaaaaggacgtcatacccgttttttgcgaggacttcacttatactttgtccgattccgccgcttgctccggttacgagcgctgtctgtttcatcaatcaatactccttctttccccagaaaaacatccctcagggcgtgagggatgtttttgttatgattttggcacgactttgcagactgtcagcctttcttctgatatttcttctttaataacccgctttacgtcttccagcgtaatctgctccagtacggttacgacatcaaacagactcatatctaaaaaggcgtagcgtgtgaattggttggcgatatattcaggcgaattgagcgcttttaagaatgacccgatcttcttttttctcgcaagatcaagtttttccgcagtcacggctgattctgcatcaagcagcatgtgttttaattcgtcagcgagcttatccggctccggtgtatctcctccgacagaggcaaaaccgaatccgtattcagccgtgtaatcaaagctgaaggtttcatcaatgtagcctttgtcgtacaagtcaccgtaatgcggtgagctttttccgaaaagacattcaagcatgaggttcatgctgagctcgtgcttcaacagatcctgccccagtttataagggtctttcgcctttaagccgacaagacattttgagccttgcacgttcatttttaactcctgctcccggcggaaaaccgcttcctgctcctgaacttcttcacgtttgatttcaggctggtctgtaaacggctttttctcctggtttttccgcacctggctgatgaccgcttcaggatctacgggaccgacgataaagagcagcatattgctcgggtgataaaacgtttcgtagcactcatacagcagatctttcgtaatatgtgagatgctctccaccgttccggcaatgtcaattttcacggggtggtctttatacatattttcgataaggccgaaaaacagccgccaatccggattatcatcatacatattgatttcctggccgatgatgcctttttctttttcaactgatttttccgtgaaatacgggtcctgaacaaaatccacgagtgtttcgaggtttttctccacattagaagtgctggagaacagataagcggttcgtgtaaatgatgtaaaggcatttgccgacgccccctgcttactgaagtcctgaaacacgtcgccgtccgctttttcaaacagtttatgctctagaaaatgcgcgattccatcagggacgtgtaccatttcttccttatttaaaggaacgaattgattgtcaatggaaccgtacttcgtcgtaaacacggcgtatgttttattaaagccctgtttcggcagcacatagacatcaaggccgtttgccattttttcatgatacagcgtttcctgaagctgttcgaagtttatcggtttagtcaagatgctccccccgtcccttttaagaaataagtcgtatccagcttaatgttctttccgacattgataatgtcctcttttgtcactttctcgatattgtcaaggaatctttcgatcggtatctctacttgggctgaggcctgctgatacagaaattccgctaaaccgtatgccgtatcaatggtttctaatacttgatttttaataacggctttcgtttgagcgatatcatcttctgaaaagtcaccgttttgcatagcctgaaactgttcttcaatgatggtgacggcctgcttgtaatttttcacctcaatgcccgacatgaccatcaaaagccctttgaagctttccacccttgaggctgcataataggcgaggctcgctttttcacggacatttataaacagctttgaatgagagaaacctccgaacagcccgttaaacacctgcaatgcaggataatccggatctatatatgtcgtattggtccggaatccgatattcagcttgccctgcttgacgtcctcttcatcaatgacttccttcggatcgggctgttcattcgccgcgcttctttcaaaaggcttcagctcccgttcttccgttttaaaatacgtatcaacggccgttttcacctgatttgtatcaacatcgccgatgacgtacaggtccagctgatcttcgcgtatggctttttgataggcttcatacaaatcttgcggtgtaatgtgttcaacatcatcgaactcgccgttgacgtgaagggcatacggttcgcttttgcacatttcctgaacgagacgcagattagaatatctcatcttatcatcatatacggcttgaatccgctgtttcagcgtccgtttttcttgcgtgacataaaggggcaggaaggcgccgttttccaaagcgggcgaaaagacaagctctgataaaagctgaaggcctttttccaataacggtgtgcggtccttcagatacttttcattaggaatctcaagcctgaacgtaatgacatgacgttctcccttttttgtcagatcagctgaaacggatgtgccgtacagctcatcaaaataagaccgcagatcagcggttttcgggcggctttctgttccgcgcagaagcacatgcggaaacagcgctctttttgttacgagctctttcgttaaaggagccagcattttaaacgtcagcgaaacggttttaaatttctcggtctttacgatgtgggcggtgatcccgccgtgctttgacttcatttcatttacgtaagtcatgtgaaacctccttcgttcattctttcatagtatgtattatgaccaaatttcagcattcgcaaaaaagagtacgcagatgtaattatatcaactggaggatttataaggaaacaaaaaacctctgcccaaaaacaggcagaggtattgaacgttattttttcaaattgaaaggccaccagttggctcttccgaatattttcaccatgaccggtacaaaaaacggaaggacgacaattgcgtacatgagaaggcctgttaataccacggttgcaatctgtaataaggaaagaacgcctgacggcagcatggccgcaaaggttcccgctaaaataatcgccgcagaaatgatgacggaacccatatttttcatactgctgatcattgcgggttccgttccttcttttttaagctcattaaaacggtccattaaaaagatggaataatccacgcctagagccatcaaaatgacaaagccgaagaacggcacggcccagtttacgcccggatacccgaagaagtgtgtaaagatgtattccgtcacgccgatggatgcgaaatacgtcagtacgagcgacgccactaaataaacaggcataatgagggagcgcagcatcacgatgagaatcagaaaaattcccgccagcataaacattgccgtccgtttgaagtctgaatccgatacttccttcagatcggcattcatgctggagactcccgaaacgccgaaggaagcattcttcagatccgtgttcggaatggccctttttacgctcgctttgatcgcttgaatatcttgaacggccgtatttgagtaaggattgttatcaagaacgacggtcaattctgtcgtttttctgtcatctgacatgtacgtattaaacacgcttgtgaaatcactgtttgtcaacgcgtctttcggcacaaaccagcctgtcatttctttgtctgacgccttgtgaagctcacccaggtaatcattcgcccccatcatgccgcttgatactttcttaagcccttttacactgtcgttaaggccggaagaaagatcgctgagccgggaagaaaaatcaccgagaccgctcttcatgtttttctggccctccgcgagctgtcctgccgccgattcaaggcgcggcatttgtcctgcgagagccccctgtccgtctgacacttgctgcagaccgttttcaatactggtcagaccgttgatcattgcgttaatttgagtgtcaatcttcttctgagcggcttccagccgggcaaattgtttttccgcttgctgcagatgttccttttgactgtcgacctgtttagaaaaagcttctgcatccgcgtttgccttggaaacagctgactgtacacccgtaaaggccgatttgatttcttggtaagagggatcggttttgactgacggtattgacgcttccaattttgcaaacggcagccgggcaagctgcttgttcaaatcggcaagctgtctgctggcttcatctttcatcggcaggacggtttttaccaattttaaagcgttttgcgtttctgaagcgagaccgctgttttggctgagctgtgaagtcagcatttgtttttgctcttcaatctgctttctcatctgggcgacgccggctttattctcgttcacgccagcctgcagtttattcaggttttctcctatatcagaaagcccggatttcagagacaatgttccgtcaataagctgattgacgcttttccccgactcttcgatctgcggctgtgaatcagctaacgactttgcggcatgccctaatccgtccgtgattttttcaagtcctgtattgcctttatcaagcccttcttgaagctgctttgcctgatttgtgacaaataattgattcaatccgtttccagcagggcgcgtgacacttctgaccgtttttacaccctctgttttttcaagttctctgctgattttttcgatatcaatcaggtgtttttcggtatttaaagtctcatcatttttgatgacgactgtggccggaagaagttctcccgggccgaaggcgtctgaaatcgtattaaacgcgcggacggattcatatttatccccgatttcgtcaagactgttgtaagatagcgaccctttgtaaagaaggataggcgggacggtgaataccgcaacgattgcaagactgatgagcggccttttaaatgaaaaccgtcctgacgtttcccatgctttgctttgaggatgggaaatatcacccttcacaggccaaaacagtctttttcctaaaacagccataaaaaacggcacgatcgtcatgagcgcaagcagcagcaccgcgacaccgaccgcaacggcggctgccgactgatacagcttaaatgtcgcaaatccgatgcaggcaaatccgatcagcaccgcaccgccgctgtacaaaaccgtctttccggccgttttgtaggtgacgacgatcgcttctcttatatcagcgccatgcgacagttcttctttaaatctgctgagaagcaggatgcagtagtctgtgccgatcccgaacataatcgcaaccataaaaatctgagtaaaagttgagagcggaaaattcagctggtcgactaaaaatgcgacaatcgactggctgactaaataagatatcaatactgataaaagcggcacgaacggagcgaccactgaccgaaatacaaggatcagcacgatcaggataaaagcgaccgttatatattcagtctttttcaagccgtcctgtgagctttttaacacatcttcgtcgatcagcgactggcctgtaatgccgtatgatacgccgtacggtttcagctctttatcaattttattttttatttcgaggatatcgtttttggatgtatcaagctgcagctgaacgagcatcgtttgtctgtcttttgacagcagctgttttttaatgtcgtcatttttctccccgaagtatgaagtcaccgttttaatctgaagcgcttttttctgttcagacaaagtgctgacggcttcttccagacgatcttttttgtctgtcattaagcctttttcgtgaaatacgatgacggcagaagaagacggtgcatctgaatcagacatttcatcaagcaattcatgggcgtaagaagaggaatacccgtccggtacggaaatctgccctttctcccgtgtcaattcagccatatcaggcgctgtaagcataaatatcaccgttgcggcgacccataccgcggcgatgatccagcgagctcgaataatgtttttcattatgtctgctgatcctcctctgtcatcatcaatcgatataatttttcatatgtattaacgaacatctccgcctcgtcttcatcaaaatacataatatatgaacggacgagttcctcaatccgccgctccacacggtgaaatacttccgtccccttttccgtgacatttaaaagtatgctccggcggtcgctttggctgcgttctctattgatgtagcctttttcatacaggcggttcgtcattgatgtaatggcgcttttattgacgtggcacaccgcggccagttcaattgatttgcaatccggattgagcataatatagcggaggatgtaatattgatccaatgtcagctctttgttcactttttcagcgataatgctgtcaattttttttaagacgtgcaggtatacatcggaataacgctgaatcagctgctttactttttcttcatgcaccttttctccctccttccgatagttaaaatgtttaactattaaaaaggataacgacttgacggtatcatgtcaatcttcaaaataaaataaaaaaagacagtgcagattacaccgtctttaatgattcctttttttcttttgcttgcgatgagatatttaacagcgctaaaaatacagacacaatgccgcaaaaagcggataaaataaaaatcagccagcctgcatttgacatcagggcagcaaagatcggcggtcccgccgctactccgataaaccgcatgctgttataaaatgaggtgatggttcccgattcctcgttgtctacgccttctgtgatgacagcgtctaaagccggcaatgccattccgataccgataccgctgacacacaaaaagataaataataaataaaaactgtgattccaccataggccgataaacgacagtgtcacggcactcattccgaaaacgatgcaaaacttcattttgccttggtcttttccgatttttctgcctgatatatatgaactgacggatagaaataaaagcgggattgccaaaagcgctcctttagccacaccgtcaattccgtatttcttctcgagtgagtctgataaataaaaaagaaccccgaacagcaaaaacataatcacgcagccgatgataaaaaccgtaaagagccagcgtccgtcacgcttaaatatgcggccgacatttttcacaaattcggaaatagaaggcgcttctttttgttcctccggctttgccaccaaaaacaatacgagaaaaaaactgatgagcgaaaaaaacggaatgaaccaaaacggcataaaccaaaaccatgcagccaagagcgacccgagaatcgggcttattactttcccggcagtgttagacgtctcaatgtcgccgagccccgcggtaatccgctcatcatcccctttgaataaatcaccgataaacggcatcactacaggagccgcccctgccgaaccgattccctgcagcacccgccccgccaagataatgggataaggatgcttgaacgcggtggaagctatcgcggcaagcgctccgcccgcaccggctatgagaagacaaggcagaagaaccttttttcttccgaatttatcggacaaatatccggcaatcggaatacaaataatcgccacaatcgaatagaccgttataattaacgatacttgaaaagacgatatggacagcttcttttcaatcatcggaagcacaggaatcagcatggaattcccgagtgtcatcacgagcggtacagaagccagagcaatgatatttttcgttccatttttcttcttactcaacttattcacccattcactatacttggttgtttcctgttttattgtgccttgcagaaaacaaagtatgtactgaaacggcaaataaaaaaacagacacatgacgcgtctgtcttaaaaacgttttcttacaacatgaaaactgaacttatcagcccggaaataatttaatgaatacagcacaggttcatcattctgattatagtgggtttgcttcagcaataaaagcgccgtctccggctcgcattccaaaaccggcgaaatcgtatcgtgatatccgatcggttcgatatcagcaacggcatagctgatcacagacccggagtttttttccaaaagatcaaaaatagactcctgttcatgacagaaagaattcggcagaatgtgcatcggaatcgtatctaaacagtaaacgaccggagtgccgcttgccgttctcacgcgttccaaataaaaaagctcctgctcaggctcaagccggaatctagcgatatcttcatcagacggcgtgatgacctgagacgacaaaaaaattgtacccggcaccatgttcgcctgctgaatcgttttcgtcacgctgttgagctgttcaatacctgaaagaaacagcggttttgtatggacgaaagtgcccacaccgtgccttctgataatcacatgctcctcttcaaggatacgcaaagcttcacgcagagttgcccggctgacacccattgattttgaaagctcaaattcagaaggaagcttttccttttcggtgtaaattccgttttgtatatcctctttgattcgctcaatcacttttagatacaagtgacgattgtcagcttttgtagacatgtttcccctccgtaaaccactttcataaattattgaacaattgggacaactatatcatgttttaataaaaaaataaataggaatgattttggtgatatcattttcagtgaaaactctctcctttttaagaagagagctcatcatattgttccttagataatagtacttccctcggtttgcttccttcatacggcccgacgacgccccgttcctccattgcgtcaatcagacgggcagctctcgtatatccgattctgaaccgcctttgaagcatggagactgatgccgtctgcatgccgataatcaaatcgaccgcttcgtcatagagatcatccgttacttcactgtgtgtttccgaaacttcttccggaatcatctcttcttggtactgcgctttttgctgcgtaatgacatgatcgacgacatgctcaacctcttcatcggataagaatgccccttgcacacgcaccggcttatttgcgcctacaggcagaaacagcatgtctccgcgccccagaagcttttcagcgccgcccatgtctaaaatcgtccgtgaatcggtctgagatgagacactgaaggcgattcttgacgggatgttggctttaataacaccggtaataacgtcaactgaaggccgctgtgtcgcgataatcaaatgaattcccgccgcccgcgccatctgtgaaagtctcgtaattgaatcttccacgtcggaagaagcgaccatcatcagatcggcaagctcgtcaacgatgacgacgatgtacggcagctcaggctgcttgacttcttcttcggcatttgaccgcttaatatggtcgttatagccttctatatttctcgtacccgtatgggagaacagctcatagcggcgctccatctcattgacgacctttttcaaagcctgcgaggcctttttcggatctgtcacgaccggcgcaagcagatgaggaatgccgttatacacattcagttcaaccattttcgggtcaatcatcatcatcttcacttcatgcggtttggccctcatcagaatgctcgtaataataccgttgacacagacgctttttccgcttcccgttgcccccgctacgagcaggtggggcattttgttcagttcggcaagcacggcttccccggaaatatttcgtcccaagccgatcagaagcttcgcgtccggcttgtcattgagcttggattcaagcacttcttttaacgaaaccatcgcaacttcagcattgggcacctcgatgccgattgccgatttacccggaatcggcgcttcgatccggatatccttcgcggcaagcgcgagcgcgaggtcatcgctcagattcacgattttactgactttgaccccgacgtccggatacacttcatattttgtgaccgccggaccgagatgaacctgcgtcactttcgcctttacgccgaaactttgaaaagtccgttcgagttttcttgcattctcgtaaatgtttttcttatcggtctgctggccggtatgtttcgggtcagccagtatgtccaatgaaggcatttgataatctttattttcaagctctgtaaacgtcatcggcggagccgcagccgtttcgccactgtcttgagcgccgccggaaggctcatcttttgccgcttgtgccgtctcctgcgttttttccggaatcagcggttcggcgggctcttcctgacggtctgaaaagcttgaaataatcggctctgaatggatgatcggcgaaataatttcctcatcctcttcctccagttcaggctcttcttttttcttttgaacccgtttttgttttttgcccgattttgtttttgttttcggcgaagacatattcgttctgaccgtcttcatatcctcaagaaatgcctgccactggccgcggataaaccggccgacggggctcgtccactttttgagcgtttcctgcagtgaacgccctgttacaagaatcagccccattaagatcagcacgatcgccatgatttgtgaacccgttgatgcaaataaaaagtgggaagctgcaaacagtaccgcgccgatcatgccgccgcccaaatcaggggaagcagcctgctgtttcatgtcaatcataaacagctcccacgtgttgccgatgacacttgccgaccgaatcgacccgtgatgagacagatttttaaagagctgcacgtgagacagcagcaatatactggcgataatacagtacaaccctgcctttcttctcgttaaaaggcttggactcttctttttccaaaacagcgaaattccgagaaggaagagcgcaattaagcataaaataaaccactctccggcaaaaaaacggaacaagtacacaaatgtctgtcccacaacgccgagctgcaaaacagcaataattgagattgcaacacagagcagtccgcttagttcgtattttagattgagcttactctcttgtttctttttagatttccgttttttctttgccacactcatcaccttactgcgttaaaaaatgtaaaatcatacatcatgaagaaaagcagccttttgccggctgcatttttctgtaggattcccctattatagcatattttgcccccgagaaacggactgaatgccggttagattttcagcttgattttttgtcccggagcgatgtccggattcagaaaatccatcgggttcgtacttaaaatctgtacgacttcagcttcatttcccttcatctcaactagcagcggcacgccggcgtaatctacctgttcatgcacgctttgctctatatcctgaccgtaaacgacttcttggggcatgatggtataaaggatcattgaatcatccttccttcctcgccctttcgttcctcaatcagctgattcaacttttttatcgcctgtccgacgccgcccacgtcatcaattaaaccgtaatcagccgcatctttcccgactacgttcgttccgatgtccctggttaagtttccttttgaaaacatcagctctttgaatttttcttcagaaatatttgaatgatgggtcacaaagttgacgacccgctcctgcattttatccaggtattcaaatgtttgcggaaccccgataaccagacctgtaagccgaacggggtgaatggtcattgtcgctgtctccgcgataaaactatgatcacatgacacggcgatcggcacacctatggagtggcccccgccgagtacgattgaaacggtcggtttcgataaggatgcgagcatttccgcaatcgcaagccccgcttccacatcgcctccgacggtgtttaaaatgatcagaagtccttcgattttcggattttgctcaatcgcgacgatttgcggaatgacgtgttcatatttggttgttttattttgcggcgggagctggacgtgcccctcaatttggccgatgatcgtcaggcagtgaatattggtatcttgggacatttgcggcagagatgtctctcccagctgctgaattttgctcataatgctgtctttcgcatctgatttttcgggctgctgttcttcggtgttttccatacgatgatccattttatctttcaccctttccgaatgtctctttgtattatgaacaaagatgatgatttccatccgggacatgaacaaaaacacagccggagcatcatgcgctccggctgtgtatacattatacttccataatgatcggaatgatcatcggcttgcgttttgttttttcataaaggaattgattcagcgcatcacgcattgcctgtttcagcgtggaccattctacggcagatgtttccgtcgcttcagtcacgatagagcggacgagctcagtagcttgtacaattaaaccttctgattctctgacatatacgaaaccgcgcgtaatgatctcaggacctgatacgaggttctttttctgcttatcgagtgaaatcacgacgatgagaatgccgtcttgtgacaataagcggcggtctctcagtacgatgttgccgatgtcgccgactccgaggccgtcaatcagaacgtttccgtacgtgactttatccccgattttcacattctggccgcggaattcaacgacgtcacctttttcaatcaagaaaatgtcgctgcgtttcatgccgatctcttctgcgattttggaatgcgctttttgcattctgaattcaccgttaaccggaattaaatatttcggtttcagcaaattaagcatgagtttcaattcttcctgcgaaccgtgaccggacacatgcacgcgtttttgggcgaaaatgacttgagcgccggcgcgggcaagcaggttgacggttttggaatatatcaattcatgcccaggaatcggtgttgatgcaatgacaacggtgtctccttcttcaatgttaagctgcttatgcgcctgcttggccatccgcgtaagagcggccagcggctcaccatggcttccggctgtaacaattgccacttcccgcttcggatattttttcacatcctgcacaggaataaacatttcatcttcggcttcaatatagccgagcttgcgccccagctgaagcacgttttgcagattttttccggcgattgcaagtttgcggccgttctggacggcagcctgtatcacttgctggatccggttgatattagacgcgaatacagcaatgatgacacggttttctgaattgttcatcgcatcggcaatttcaccgcttacatatgcttctgacggagtataccccgggcgctccgcattggcgctgtcagaaagcagggcgagcacgccgctgtttccgattttggcaatttcgccaatatcacatgattggtgataagcaggcgtctggtcaaatttgaagtctcccgtgcatacaatagagccaagtgatgttttgaagctgactcccactgaatccggaatactgtgaatcgttttaaagaacgatactttcgttgattcaaatgtaatgactgatttagaatgaacttcacgcaaatcagcttttcgattatgcccgtactgcttgagtttttctctcagtaatgcaagcgtaagcttcgttccgtataccggcaccgacagcttgttcaataaataaaagacgcccccgatgttttcatcgtgcccgtgtgtcagaaagatggccttcacgcggtcagcccgttctactaagtaggaaatatccggaatgacgacatcaataccgagcatttcattttcagggtgcatcagccctgcatccactacaaatatgtctgagtcaatttcaatgacatataggttcttcccaatttctccaacgccgccaagggcgataattctgacgttttctgtatttttctttttcaaaatctgtatcctcctagtctcatacccgtccatcatcacttgttcctattataactgatatcaattttagaaaacaagaagaagcggaaggtttagggaaaaccaatatgtatacaaaacggtcaaactcacgataaaaatgagaatgaccgcgtattttaactgtataaattttttcttacagttcgctgatgacgctgctcaggctcagacgttcatcttcattcagcgggataagaggaagacgcacagatccgacatcaaggcctttcagctgtagcgccgttttgaccggagccggattaggcgctttaaagagctccttcatgatcggcagaagcttctgatgaatcagtgccgcggttgccgtctgcccgtttgtatagtttttaatcatctgctgcatgtcagaacctacgatatggctggccactgacacgactcctcttccgccgactgcgagaataggaagcgttaacccgtcatcacctgaatagacgtaaaaatcttccggtgtttcggcaatgattttcgtaatggcatcaagatcgccgctcgcctctttaatcgcagagatattcggaatctccgcaagtctgatggccgtttccggcgcaagcgaagcgaccgttctgcccggcacgttgtaaagcatcacaggaagagacgtttcttccgcaatggctttaaaatgacggtacataccctcttgggaaggcttattataatacggcgtgacaagcataacgcaatcgacgccggcttcttcagctttttttgtcagtttaatggagtctttcgtattgttgcttcccgtacccgcaataacaggcacgcgtccgttcacttctttgactgtaaattcaaagagtgcaattttttcttccgttgaaagtgtcggagattcgccggtcgtgcctgcgacgactaaagaatccgtgccgtttttcaacaaatagtcgattaatgtagacagtttttgaaagtctacattccctttactgtcaaagggggtaatcatcgctgtagatatatttccgacattcatttttttcacctcatcatgattcaatcacatttactttgaaagttcaaacacttcatgcagcgcatttacggccgttaccatatctttttcatgaacgagcacccagatcgtcgtatggctgtcggcagattgcagaatcggaatgcctttatcagaaagtgcggagacgatttttgacgtgacacccggaacacccattatcccggcgccgaccgctgacactttcgcacagctctccgtcactgtcggctcatatcctaattcagccaaaatgctgcgcgcggcttccgttttactgccggccacggtatatacgatttcactcggcgtaatgttaaagaaatctacgctgattccggcatttgccattgctttaaagacttcagtctgcacgttgtattgccccattttggcgggaaccttaaattgcgtcacatctttcacatgggcgatccctgtaatcagccgttcgaatacatcgctgccgatgttagacgaatgatgggacgtcaccaaagtgcctttgtcttttgaataagtggagcgcacgcgaatgggcacctttgcctgcatggcgatttccaccgcgcgcggatgaatgactttcgcgccttgataggcaaggttgcagatttccgtatatgtgacgttcggaagcggcttagcattttccacgattctcggatcggctgtcataacgccttccacgtccgtaaaaatgtcgataaactcagcatctaccgccgcgccgagcgccgctgctgaagtatcgcttcctcctctgccgatcgtcgtcgtgtcgcctttttcagtcgctccctgaaatcctgcgacaacgacagcgtcatggctggcgagtgcagcgaaaagccgctctgttctcatttctataattttggcgtcagtatgctgggcattggttaaaaagccggcctgggctcctgttaaagctgcggcttttatgccgttttccttcagcatgctggaaaaaacaacggacgaaatcgtttctccgcaagacagaagcatatcctgctctctcggagaaatgtcggactggctgccgtaaaggagcccgattaaagaatctgtcgcgtacgggtctccttttcttcccatcgccgatacgacaacgacaactttataaccttcactgatggcatctttaatgtgtgctagcgcaagcttgcggcctttgtcatcttttacggatgttccgccgaatttttgaacaatgatcttcactattttcactccaaattagtctgacgtaacagaagagagcaggcagagccttactctcttctgttcgcctatagaaaatacgtttgttttatacgaggttcagtttttgcaggctttccgcgatttggactgagttccaagcggcgccttttaacaggttatcagaaacaacccacaaatgaaaaccgtttgctctgtccaaatctttacggattcttcctacaaatacatcgcgtttgccgacgcaatcagcaggcatcgggtaaagctgctccgccggatcatcctgaagcgtaacacccggagcttcttttaaaagctgtttaatatcttcaacggttgcgtcatcacggtcaagctcaatgtaaacagattctgagtgccctgtttcaatcggcagtctgacacatgtcgcagccacttccagcttcggcatatgcatgatttttttcgtttcattaatcattttcatttcctcaaacgtatagccgttgtcttggaatttatcaatttgcggaatggcgttaaatgcgatttgataatgctttttgtcgcctttaaccggcataatggacggttctgcgggttcattgtttaaaatcgcctttgtctggctgtacaattccttcgccgcttcattgccggccccggacacagcttggtaagtagatacaatgactttattcaaaccgtacgctttgcggatcggttcaagcgcagccaccatctgaatcgttgaacagttagggttggcgataatgccgttatgtttgtgcagatcaccttcgttcacctcaggcacgacaagcggtgtattttcgtccatgcggaatgcgctggtattgtcaatcacgatggctccccgttttacagcctcaggcgccaagctttgtgatacgcttccgccggcgctgaataacgcgatatggacgccttcgaagctttcaggaacagcttcctgcactgtatattcttcgcctttaaacgttactttcgtaccagcagaacgctttgaggatagtagtgtgagtgtttcgatttcaaagtttctgtcttccagtgttttcagcatttgctgtcctacggctcccgtcgctccgacaactgctacgtgtaatcctcttcccatctgtaaaactccttccgccaattaagcatcatttgttgaattgactttgcattttacgttttattttaccatagaatagtcacggattgaccgaatttttttattcgggaatgattttctgtcatcatgattttttattcatgatggtgtacgagcaccggctgaacctgctggtgcaaaagagctttttctaccgtaatcggaaggagatccattctggcgacgagcgatgtcggttttttcacgtgatcgtcctgaccgaacgggatgaaatatatgttttttgcggacatcagcctcattaaattcgttccgtttaaaccgagtccgtcgtttgtcgaaattccgagcacgaccgggcggccgttgcggatcgtggctttcgcagccataaggacggggctgtcagtcatcgcatttgcgagtttgctcattgaatttccggttaagggggcgatgaccatgcagtcgagcggaagtttcggcccgagaggctccgcttttacgatggaatcaatcgcctcaaagcctgttgcttcttcaatttttctgacccaatctcccccctccccaaagcgggtatcggtcgattgaacggttgatgtcacgaccggccggacttcagctccttgactgataagcgcctctatttgcggaaaaacttcctcatatgtgcaatgcgagccggttaatccgaatccgattcttttccctttcagagacatggttatttcccctctttctttaagtctgccaaaagcttgctcaatacgttcgcaataatctgtccggctgttttcggggccactattcccggaagacccggagcaagcagcgctttaatgccttgtttttcagcatatttgaaatccgttccgcccggacgggatgctaaatccaaaatcaaggtcttcggcgtcatgcgcgataaaacgctttgattcagaatcaagctcggtacggtgttaatgcagatatcaatatcatttacatgttcagtaagctcttcaagttgaaaaggagaaagccccatttccattatacgggccaaatgagccgaactccgcgcgcccacttttaccttcgcccctaacgccgcaaacgtccgggcgatcgtcataccggtgcgccccatgccgagaacggcgacatttgatccgtgaatggtataatccgtatgctgaatcgccatcatgattgttccttcaacagtgggaatcgagttgaatatcgcgatgtcgtcccgttcaaataatttcacaagcttgcggcccgcttcgctggcgatcccctcaagatacgcgttggagatgcctgaataaatgacgcaatgctccggtgtccgctcaagatagctctgctttaatatcacttcttcatttgaaaaaaccgtggaaacaacgccttctccggtcgttgccgatacgggcaggatgatactgtctattttttgaaagggaatctcatcgattttgcatttgacagttcctgtaaaaccgtcatccaattggtcaaaccctgcaagataaatatcggcatgctgttctgtcagctttcttataatctcaagctgtcttgcgtcaccgccaatgatcgcaattgtcaatccggttaacatctgaaacgttcaccttctttacagttactggatcttttaagtgtcatcctcctcttcatcgtatgtgcgaagagaaagggcggtgaatgtacagcgtctttttcataaaaaaagcaccggctgtatgagccggtgcttgcaacaattgaataagatctactcttcgggaggcgtgatctcccccggaacgtctaaaatgatcatgtctgacccgattttttggatatggttccaggggacgcggatgtcgtggccttgttttcgcaatccgaaccattttaccgtcggtatcaacagcgcggtaatttgtccgtcctgttcattaatttccaaatcggtctggccgagcacgccgagccgctctgcccgtttaatgtccacaatttctttacctgacagttcactgagcctcatgatagccacccccttgtactatatgacccggagcaaaaaaaaatgcctgccccgtatagaggcagactgctttgccgattaagacgaggccggcatattgccggtcgggctgatgagcgatagtgcgtaatcatccgtaaataagcggcggctgaggccgttgacgctttccaggctgaccgcatttaattcagtgataatttcatccatggtcttatgctttccgagcaggagttcgttttttccgttccggctcattttgctgtttgtgctctctaagctgagcattaagctccccttcatttgctctttgctgttttccagctctttcggggtgataccgtcacgttttagaaccgataacgtttcctgaatggtttcagacagaagtccgagctgattcgcgccggtgcctccgtaaatcgtcagcataccgctgtcttcataggaactgtgatagctgtatacagaataggccagtcctttatcttcgcgcacatcctggaaaagacggctgctcatgcttccgcccagcacgttgtttaagacgatcaaatcgtaaatgtccggatctccgactttcaggcctttgaaaccgagacagagatgcgcctgttcggtgtctttttttctggtcagcttttcataatgaaactcaggctcgctgatgccgcttgctttgcccttcgcttcgtatgtaccgaaccatttctccacgtctttaatgaattgttccgttacatttccggcgacagaaatgacgacgcggtccggcgtgtaaaagtcatccatatgctgtctgagagaatcgccgttaaaggacgaaagcgtttcctccgtcccgagaatcgggtagccgagcgaatgattgccgtatgtcgctttgctcagcagatcgtggacaatgtcatccggcgcgtcttcatacattttgatttcttcatatacgacgttcttttctttcttgagctcatcttcgtcaaaagcagaatgaaagaacatatcagccagcacatcaagtgcgtagtttgcatgctcatccagcactttggcgtaatagcacgtatattcttttgaagtgaaggcattcacttggccgcctatccgatcgaaggattctgcgatttcccgtgcggacctggtatttgttcctttaaaaaacatatgctcaagaaagtgcgaaataccgtttgtctccggcgtttcatggcgtgaccccgtcccgatccagacgccgattgccacagaccgcaccgttggattattctcaagcacaactcttacaccgttttggcatgtatagcgttttatcaagtctgttcctcctattcaaagacaggcaaactgccgcctgctacttcatcagcctgttttcatccattaagtcagacactgagccgagcgcgtagcctttttctttgatttttgcaatcagtgtatccaggcttttcgcagtcggatcagtcggatgcattaaaatcatggctccgttatgtattttgctcaacacccttgtttgtaaaacagccggagacggtttttgccagtcaatggtgtcaacggtccacatgatggtgcccattcctttttccgccgcaaggtcgaccacagcttttctgaagctgccgcttggcggcgcaaaccatttcggctttatgccgagcgtctcgctgatttgtgcattggttttgtcaagctgttcggaaatgcttcctgaagtcagtttgctcatatcagggtgattgtatgaatgatttccgatttcatgtccgtctgccgctatttttttccccagttcctgattgtttttcagccatttcccttcaagaaagaaagttgctttgacctggtgctgcttcagaataggcagcatttgctccacatattcatttccccaggcgacatttatcaggaaagcgaccatcggtttgtcgggatttcctttataaatgggttcgggcgcgagagaatcaagatggactttcggttttacctgctcatagacaaggccgtcttcgtgaaattctccgtcctttttcatttgcttataggatttttccacgttgacttttaaaccgttatatcccggtatactcttccatattttatcaatccgggcgtcttgcggcttcacttcatactctggcgctttttgcagtaattcttcatagagcggatcttttgatgctgacacagttacagcgtcttttttcattgcgtctatgtaatcaactgtatacgggttttttaacatttcaaacgaaacaaaaaaaagaaataaaaaaacggcaaacggcacgaattttttcaacatgtccttcccccctcatcacacattatgtatgaggaggacaaggtagaacccgtctgttgtctttctcaaaataaagaagccgggtctcccaggctccttgttaggttttcatttaagattgttgttgttcctgttctttttctttctcttcgcgcagcactgctttacgcgacagattcactcgtccctgtttgtcaatttcagttaccttcacaaggatttcgtcaccgattttcacaacatcctcaaccttgccgacccgttcgagcgctagttcagagatgtgaacgagaccgtcttttccgctgaaaatttcaacgaaagcgccgaatttctcaatccgtttgactttaccgaggtaaagctggccgacttcgacttctctgacaagatcttcgatgatttttttcgctttttggttgctgctttcatcagtagaagaaataaagatggtgccgtcttgttcaatgtcaattttaacaccggtatcttcaatgattttgttgatttgtttaccgctcggtccgataacgtcacggattttatccggattaatgttcatcgttaaaattttcggcgcatattgagaaagttcttttcttgattcaccaagcgtgctgagcatgctgttcaagatttccattcttccttttttcgcctgctgaagcgcttcttcaagaatttctcttgaaaggccttcaattttaatgtccatttgcagcgctgtcacgcctttttccgtgccggctactttaaagtccatgtcgccgagggcgtcttccatcccttgaatatccgttaataccgtatagtactcgcctgatttcacaagtcccatcgcaatacccgcaacaggggctttaatcggaacacctgcgtccatcatggcaagcgtgctcgcgcaaatgctggcctgtgaagtggaaccgtttgattcaagcacttcggatacgaggcggaccgtatacgggaagtctttttcattcggaatgaccggctcaagcgcacgctctccaagagcaccgtgaccgatctcacggcgtcccggtccgcgcatcgggcctgtctcccctacgctgaactgcgggaagttataatggtgcataaagcgttttgattcttccacgcctaaaccgtcaagaatctgaacgtccccaagggcgcctaatgtacatacgctgagcgcctgcgtctgtcctctcgtaaacagcccggagccgtgtgttctcggcagaaggccgacttctgaagaaagcgggcggatctgatcaacgccgcggccgtccggacggactttttcttctgtgatcaaacggcgcacttcgtttttcacgagtttagacagtgtctgtttcacttttttaatcgtatcttcatcatgctcttcttcttcgaatttcgcgacaactgcatttttcacttcattgatcgcggcttcgcgagcatgtttttcgtgaacctgaatggcgctgagaagatccggctccgcaaggctttttactttttcgctgagctcttcgtcaatttcatacaggtcgatttctgttttttctttgccgactgctgcgacgatttcttcttggaatgcgatcaggcgcttaatttcttcgtgaccgaacataatcgcctcaagcatgatttcttcaggaacttcatccgctccggcttccaccatgttgatggcgtcttttgtgcctgcaacgatgaggttgatatcacttttttcaagctggtcaaccgtcggattgatgacgaatttcccgtcaatgcggcctaccgtcacacccgcgatcgggccttcaaacggaatatcggaaacgcaaagagcgagtgatgaaccgaacattgcagccatttcagatgagcagtcctgatcaacactcatgacaatgctgatgacctgtacttcgttacggaatccgtctgcgaaaagcgggcggatcggacggtcgatcagacggctggctaaaacggccttttcacttggacggccttctcttttaataaaaccgcccggaattttacctactgcgtataatctttcttcatagttaacggtaagcgggaaaaaatctagcggtttcggttcttttgatgcggttgctgtgctaagcactgcggtatcgccgtagcggaccatgacagcgccgtttgcctgtttggcaagctggccggcttctactgtaagctgtctgccggcccaatctatggtaaagacatgtttctcttgtcccattcgattacgagctcctctcttaatgtgtgaaataatcaattactcctattatgaacgaaatgaattgaacatatcaatgtcaaagtagtatgtaaaaggatttcattgtttttttatcattatttttttcgctttaatacgataaaaaagcgggaatcctcccgctttttacgattatcgacgtaagcctagtttgttaattaactcacggtaacgagttacgtctttattacgcagatacgtaagaagattacgacgtttacctaccattttaagaagaccgcgacgtgagtggtgatctttcttgtgagtacgcaaatgctcgttcaagttgttaattgagtctgttaggatagcgatctgaacttctggagatccagtatcagattcgtgtgttttgaactcactgatgagttgatttttacgctcttgagtaattgccatcctgtttcacctccatatcataattagccccagttacctagcaaccgtcggtgacttcggattgccaagcaatggttttaagactacgaaacatatgatactaaaaatcgcgcccatatgcaaatcttttagaagaaaatttgtgtacttttgatgttttttccgttatttgctgaaaaaacggatcgcttcttgtttgtctttcccgatctgagccgtcagttcatcgatgccgttaaacttccgttcgcttcggattcgtttgtaccactcgattttaacgtcttctccgtatacatcctgttgaaaattaaacaaatggacttcaattgacggctgatcgggacgcttttcataaaaggtcggtttgtagcctatgttgcagacgccttcatacacctcgccttttatttcggctttcactgcatacacgcctgtcggcggcacgatataactgttgtgcaggccgacattcgcggtaggaaaaccgatggttcggcctcttttgtctccgtgaatcacagtgccccggataaaatacggctggccgagaagagtgtgcgcaagttcaacgtcaccatcctgcagcgctgaccggatataagtagagctgatctttctgtcctgctcggtctgtttctcgacagtcgtgcatccggccttgccgtttaaatcgtccggcagcgtctccatcgtgccttttccgtattttccgtacgtaaaatcgaagcctcccacagcgtgccgcgcgtttaaccctaaaatatactcctcggcaaactgttttggagacagagacgcaaacgcttcatcaaactttacgacatacagcacatcagcgcctaaacgcccgatctggctgattttatcttcaagcggcgtaatcagatcctttggctctttgtccctgcccaacacatgggaagggtggggatgaaacgtcataacggccagcgacaggcctttttcttcagctatttgtctggctgttccgattactttccggtgtcccaaatgaacgccgtcaaagtagccgagcgccatgacagacgccggctgctcttctttttgtaaatgatgcggatgagaaatatgtatcgtcttcacagaacggtcaccttttttcttattgttcgcttttttgcatgagcactttagccggtttcagcagtcctttttttgaaggatgcggcatataaatggccacacattctccgtcttcagtacagaccgctatacgggcgtcagctgtcattgcagaaaattccgccgggatgtcaaacactgacccgttttcagctttcttagctaatgtatcacttatgacccatttcggcaaatgattgagcgctctttcaatcggcacggcatgctctgcaaccgttccgtctgaaacctgctgttcaagttccccaaacgtgaaacactcatcaaggctgaaatcgccggaagcggtgcggatgagatgcgacatatgcgcgggatagccgagtttttcaccgattgtcaccgccaatgttctgacgtaagtgccctttgagcacgtgactgtaaagcggaatgatgctgtgtcttctttataagttacaggggaagtgagcgcgatatcttcaatcgtgatattccgcttcggccgctccacttcaataccggctctggcgtattcatagagctttttcccgttgacctttacagcggaatacatcggcggcacttgctcctgcggtcccttcagttcgtctaaaacggctttgatatccgcttctttcagcggctccttgacaggttttacgctgaccgtttctccagtctggtcttcggtcgatgtggagaagccgagagtgatctcagcatcgtacgtttttgacttgtcggtgacgtactcaacaatctttgtggcccgtccgacacagatcggcagtacgcctgacacttccggatcaagcgttcccgtatgtccgactttctttgtttttaacagttttcttattttcattacacagtcgtgagaagtcatgccgaccggtttatgtaaaaggagaactccgttaaccatctgtctttcgctcctttgttatcaattgtatcccgtaaaacgcagaaaagaggacagacgacactcgcccatcctctttccttgttattcagacggtttatctgaatgcagttcgtgaatcaatgtttcaatacggttgccgtactcaattgattcatcaaattcaaattcaagctcaggcgttttgcggagtctgattcggctgccgatttcagaacggataaatcctttcgctttctcaagccctttcagcgcctcctctttctttttctctccgccgagaacggagatatacaccttcgctatttgtaaatcacctgaaacacgtacgtctgttacagtgagaaatccgattctcgggtctttcagctttcggctgataatatccccgagctcttttttcatctgctcgccgacacggtttgctctcatactcaattcaatcacctctaagttaaaaccactctgttctagtgatcgtccgttctatttcgggaaaggagtcaataaacgcgagtacgcgctggatctccttttccgcctgaacgtgagaggaggagacgacggcgattccgaagctggtccgctgccaagtgtcctgatagccgatttctgcggccgacacgttgaacttattctgaaccctcgttataatccgcttcagaacggctcgtttctcctttaatgatcccgcatcataaatgatgcattcacattccgcaaatccgatcactttctttcgatttcctgcatgacatacgcttcaatgatgtcgccttcgcgaatgtcattgtatttcttaattgtaataccacattcatatccttgtgaaacttctttcacatcatctttgaagcgtttcagaacgtctacttccccttcgaagataacgacgccgtcacggatcaggcggagtccgctgtcacgtgtaatgtggccgtctgttacatatccgccggcaatcgtgccgattttcgacactttgaatgtttggcgcacttcaacctgaccgatgactttttcttcgtattcaggatcaagcattcctttcatcgccgcttcaatttcttcgatgactttgtaaatgatacggtgaagacggatatctacattttcagcttcagccgtgctcttagcatttccgtctgggcgcacattaaacccgataacgattgcatttgaagcagatgcgagaatgatgtctgattccgtaatcgcaccgacgcctgtgtgaatgattttcacttttacgccttctacttcaattttttggagagcggctgttaacgcttcggctgaaccttgaacgtcagcttttacgattaaattgatgtctttgacatcgccttgtttaatttgttcaaacagatcatcgaggctcagcttcgctttgtcgctgcgctgttcttccagttgcttggaagcacgtgcttcaccgacagaacgggctgttttttcgtctttaaagacgaggaattgatcgccagcctgcggtacgtcgtttaagcccgtgatttctacaggtgtggacggtccggctgttttcacgcggcggccgagatcattgaccatggcccgcacgcggccgaatgtatttccgacaacgatcggatctccgacattcaatgttcccgtttgaacgagaagcgtcgcgacagatcctcttcctttatcgagctcagcttcaataaccgttccttttgcctgacggttcggattggctttcagctcttccacttcgctgacaagcagaatcatttcgacaagctcgtcaattcccttgcctgtaagagcggacagaggaacgaaaatcgtttctcctccccatgcttcaggaacgagtccgtattcagtcagctcctgcatgacacggtcagggttcgcgctttctttatccactttattcacggcaacgataatcggaacctcagccgctttcgcatggttgatggcttcgactgtctgcggcataacgccgtcatcagccgctacgactaaaatggtaatatcagttacttccgcaccgcgtgcacgcattgttgtgaacgccgcgtgtcccggagtatctaagaacgtgatttttttgccgttttcttcgatctggtaagccccgatatgctgggtgattccgccggcttcaccttcaacaacttttgtttttctgatgctgtcaaggagggtcgttttcccgtggtcaacgtggcccatgatcgtcacgacaggcggacggatttgaagatcttcttctttgtcagcctcttcatatttttcaagctcagtttcttcaagcacaatcacttcttctgtttctacaccgtattcagatgcgatcagttcgattgtgtctttgtcaagctcctggttaatcgtagccattacgcccagaagcatcagttttttaatgagttcagacggctctttgcccagttcctcggctaaagctccgactgttaaagagccggaaaacgtaattttctcaggaagctcttttttcggcttcagcggtttttgctgatactgatttttgttgttatgattgcgtttgtttttgtttttgttgttgttgttgttcttcttgtttttgttaaattgattattctgcacgtcattcttctttccgtctcgaattttgtttggttgattcccagcaggctgctgattaatcccttgcggcttgtttttgttcgtttccgcaggcttctgagatgtaacgccggcgccgccttttttaaatttcgcatcaagctgcttaatggtcttttcttcaagcattgccatatggttatttactactatatccatgtttttcagcgcagtcaaaatttccttgcttgaaacattgatggcttttgcatattcgtaaactctcattttagccattcgttcacccccaaaaatattaatcgagcaagctgatcagcttattcgcaaaaccttggtcagtgacggcgacaacgacacgtgattccttgccgatagagcggccgagatccgcgcggctttcgacttttttataaggcactttataataattgcatttatcggatactttttttgcagtattcgcagatgcatcttctgtcagcagaacaagttttgcacgcgcatttctaatttcttttataaccaagtcctcgcccgacacgaccttacgagctcgattggccagacccagcaagggaaaccattccattccagacatgttattttttcaccttttccgccagttccagcaattcttcgaaaatctggtcatcgatttgtgattgaaattgattttgcaatgtgtttttctttttcgcagctaagatgcattctttctcaagggtgatataggcaccccgcccgttcttctttccggtcggatcgactgaaatctctccttctttagaacggacaattcggatcagttcctttttaggcttcatttcccccgttaccacgcatttgcgcagaggaattttttttcgcttattcacctaaagtcacctcttattcatccgattcggctgtttcaggctccataaagagcggctctaaatcgtcatcttcttcatgctctctcggatagatgccaaggtctcttgcatccgtttcacttttgatatcgattttccagcctgtcagtttcgcggctaagcgggcgttttgccctctttttccgattgccagagaaagctggtaatcaggaacgatgacagtcgtggctttttcttcttcgctgacgatgacatccagcactttagacgggctgagcgcattggcaacaaattcaaccggatcatcagaccagttaacgatatcaattttttcgcctttcagttcattgacgatcgcctgcacgcgctggcctttaggaccgacgcatgaaccgaccggatcaacgtcagggtcatcagtgcggacggagattttagagcggtcgcccgcttctctggcaacggatttcagttcgaccgttccgtcataaatttccggcacttcgatttcaaaaagacgcttcaacagaccaggatgcgttcttgatacatagatctgcggcccttttgtcgttttttcgacttttgtgataaatactttaatccgatcgtgcggtttatagctctcattcggcatttgttcattgacgggcagcagcgcttcaatcttgccgagagacacgtaaataaacttgctgtctaagcgctgtacaattcccgtcatgatgtcttcttcacgatcgataaattctgagtaaatcacgccgcgctcagcttcacggacacgctgcgtcaccacttgtttcgccgtctgcgcagcaatgcggccgaagtctttcggcgttacttctatttcaacgacatctccgacaaggtagttcggatggatgtgctgggcgtcgtcaagcgagatttcaagtcttgaatcgtatacctcgtctacgacatcctttcttgcgaacacgcggatcgtgcccgtctcacggttcagatcgacccgtacgttttgcgcctggttaaaatttcgcttgtacgcggaaattaaggcagcttcaattgcttcgatgataatgtctttactgatgcctttttctttttcaagaatagtgagagcatctaatagttcactgctcatgttagcggtctccccccttaaacactaatacttcattcattaaaatgttacagctaatcttgcgttagctattttttcatacggaatattgacccgtttctttcttgttttgaccgtcatctctattgtaacagtttgtccatcgaattcagccaatttgccttcaaacacttttaaaccgtcaatcggttcgtacgttttcatgtacacatttttgcccagtgatttttcgaagtcggcttttttctttaatggacgctcggctccaggagaagatacttcaagaaagtagttctgggtgatcggatcggcctcatccagcttttcgcttaatgcttcgctgactttggcgcactcctcaatatcaacaccgttctcggaatcaataaacacgcgaaggaaccagttttgaccctctttgacaaattcaatgtctacgagttcaagctgaaggtcatccagtatgggctgagccattacttgaacggtatcagtcacttttttgctcatgtttttcctccttgtgctgtcgatatcatatcagccgttcctctgcataaaaaccctgcttctaaagagcaggggcattgagaaaacgatggacatgtcgaggcaaaattgcctgttcaatacaaaagagcgggtttccccactctttgcctcggtaatcgttagcatttccaataaaactataccataaccatatatttaatgcaaatcaaactccgctcggaggctgtgcacaaagtttaaaacagagacagctgattttggtccggaagcgactcaagacagccgtgacggtctaaatactctaaaatggtttttgacacttttccgcgtttttgaagatcctcttttgaaaggaactccccttctttccgcgctttcacaatattgagagcggcgttggttccgagtcccggaattgagttgaacggcgggatgagactgttgccgtcaatgataaattccgaagcgctcgaacggtatagatcgaccttctggaaggaatagccgcgctcacacatttcaagcgcaagctctaacacggtaagaaggtttttctccttcggcgaagcatcaagccctttagagctgatatcatccatcaccgctctaatggcggtcgagcctttaatcattgtatcaatgtcaaagtcatctgcgcggacggtaaaatacgcagcataatataaaagcgcgtgatgtactttaaaataggcaatccgcaccgccatcagcacgtatgcggcggcgtgggctttcgggaacatgtatttgatttttttgcatgaatcaatataccagttcggcacattgttctttttcatttcttcttcccattccggcgtcaggcctttgcctttacggacgaattccatgattttaaaggccagtgaaggctcaaggccctgatagatcaagtaaaccataatgtcatcacggcagccgatcacttcgctcagttcacacgtattgttgtgtatcagttcctgcgcattgccgagccatacgtccgttccgtgagaaagcccggaaatctggacaagctcggagaacgtcgtcggcttcgtatcctcaagcatctgccgcacaaatcgcgtcccgaattcaggaatgccgagcgtccccgttttacagccaatctgctcttcagtgacgccgagcgattctgtgccttggaaaatcttcataacttccggatcatctgtcggaatcgtcttcggatcaattccgcttaaatcctggagcatccggatgacggtcggatcatcgtgccctaatatatcaagcttcagcaggttgtcatgaatggagtggaagtcaaaatgagtcgttttccattcagaccccgtcgcatctgccgggaattgtatcggtgaaaaatcgtaaatatccatgtaatccgggacaacgataatcccccccggatgctggccggtcgttctcttaacgccggtgcagccttgcaccagacggtcgatctccgcgccgcgcatgtgtaggttgtgatcgcccgcatagcctttcacatatccgtaagccgtcttttccgcgacggtgccgatcgttcccgcgcgatacacgttatcttcaccgaacaatactttcgtgtagttatgggcatgcggctggtactcacctgagaagttcaagtcgatatcgggtactttgtcacctttaaagcctaagaacgtttcaaacgggatatcatgtccgtcctttttcaaaggggtgccgcaagacgggcagcttttatccggaaggtcaaaaccggaaccgactgatccgtcattaaagaattcggaatatcggcagctcgggcacacgtagtgcggagcgagcgggttcacttcagtgatttccgttaaggtcgccacaagcgatgaaccgacggacccccgggagccgacgagataaccgtcatccagagaccgttttacaagcttatgagagatgagataaataacggcgaatccatgaccgatgatactttttaattctttttctattctcgcttccacaatttcgggaagctcttcaccgtaaatgcttctggcgcgctgatagctcatttcacggatttcttcatcagccccgtcaattttcggcgtgtacagatcgtctttgatcggtttgatctcatcgatcatcgaagcgactttctgcgtattgtcaaccacgatttctttcgctttttccgcaccgaggaaggagaaagcctccagcatttcatctgtcgttctgaagtgcactttaggcagttcgtgtctgtttaacgggttggcgccgccttgggaagatattaagatcttccggtaaattttatcctcatcgtttaaatagtggacatttcccgtagccacgaccggcttattcaatttttctccgagctttgtaatgttggcgatgatttctttcagcgctttttcatcccggacgagctcaagctgcagaaggtgtctgtatacttccggcggctgcacttcaagataatcatagaaggatgcgatatcttcaacctcttcaggagatttttgcatcatgccttcaaagacctctcccctgtcacaggcagagccgattaacagaccttctctgtatttattaagctgcgacctcggaatgcgcggcactctgtagaaatattgaatatgagaaatggacacgagcttaaacagatttttaaggccggtctcattcacggcaagcaatgtagcgtgataaggccttgatctctgataagcattggattgtcccatattctcattcagctgatcatgataaaaaatgtctttttcagcggcatctttgagcattttcaacagcaggtagcccgttgcttcagcgtcaaagaccgctcggtgatgctgggttaattcgatatcaaacttcttacataacgtatttaagcggtgatttttaaactcaggatacaggaaacgcgcgagttccagcgtatcaatgaccggatttttcgctttttccgttttcaaaagacgcttgtacgccacatttaaaaatcccatatcaaagctggcgttatgagccacaagcacgtcatcgccgatccattctttaaaatcccgtacgacgtcaacgacatcgggagcgtcgcggaccatgtcgtccgtaatcccggtaagctctatcgtcgttgctgacagcggatggtgcggattggcgaaagcttcgaatttatcgatgatttctccgcctcttattttgactgcggcaagctcaatgatggtgtcatacactgcggacagacctgtcgtttcaacgtcaaagacgacgtatgtgtcttcttccagtagacggtgagctggattgtatgcgatcggaacgccgtcatctacgatattggcttccattccgtaaatcattttaatgccgtgttttttcgcggcggaataggcatccgggaaagactgcacaacggcatgatcagttaacgcaatcgcttcatgtccccattttttcgcctgttcgacaagctttccgatgcccgttacagcatccatttggctcatcggagaatgcagatgaagctcaacccgtttttcgccttcaggagcggtgtcttcacgggttttggcttttatttcattcacgtcatttgcaatcatgacgaggtctctgacgaatgtatcgttttgaatgcttccccgcgccttcacccacatgccttttttcagcgttttcatcaaagcggcgtcttctttttctctggcgaacatttttactaaaatgctgtttgtatagtccgtgattttgaaaatgcagagcgtgcgtccgcttttcagctcgcgtgtttcagcatcaaacacaaacccctgcaccgtaattcttctttcttcatccatgatgctgtcaagcgtccggatttcttcgttctctttaatttgatagccgatgacaagcggtccggacggtgcctgatcctcatcgccctctttttccttcttctccatctcgataagcgcctgcatcgcccgctcctgatcttcagcaagcttttgctcgcggaatttctggacttcttggtcagatacgaaaatttcggtatccagctgcagttccggaaagccgaattggcggtagctgtgctgaatcagcgcgctgtatttatttttgagcgcagatgcttctgtatctgtttttgttttcacgatcagtttgtttcccttgagcttcggcttctgctgattcaaaagagccaccatcggcggcgaggttccttcaagctcttcaatacagcgtgtccaataatcctgtacaagctcctctgtcactgtagggtcgatgacctgaacagacgatgtgacacgggcgatgtgagcaaacgattgtgttaacctcatcatgaatgagtcatatatttgatacggcagaagagccttaaagcgaaattggaaatgccaggctttttctgctttatggattgtcagtttatcaatctctccgtcttcaaagtatgttatgaaggtatcatctgtcatattaagctgctgcagaagaatctgaaactgtcttctgtttactgataactgttccattcagacagtatccctcccttaaaacatcataagtgaaggtacctccgcaggtgatgaggtaccttcttttttctctattttaacatgattttgtatgattcgttatggtgattacttcgtcttgataaattcagaaagctcatccactgaaacttcggcagattcaccggttttgcggattttcacttctacgatgccttcatcggcacgttttccgacagtgatacggatcggaaggccgatcagatcagaatcagcaaacttcacgcctgcgcgttcagcgcggtcatcgtataatacctcataaccttccgcctggaatttgccgtaaagctgttcagcaagctctttttgcgcttcgtttttcatattcagcgccaaaatatgaaggtcatacggagcaacgcttttcggccagatcaaacctttttcgtcgtgatgctgttcagcgatggctgaaagcgttctggacacgccgattccgtaacatcccatcagcatcggctgcgcacgcccgttttcatcaaggtatgtcgcattcatcgcttcagagtaacgcgtgccgagtttaaagacttgtccgacctcaatcccttcagcgaaacggatcgtgccttttccgtcaggtgacggatcgccttcctgaatgattcgaagatcggcatatgcttttactgacgcgtcacgttcgatgtttacgtttcggtaatgacggtctttttcattcgcaccgctaacggcgtttaccattacttttacggcttggtcggcataaatctcaatgtcgccggcagcgccgatcggccccgcaaatcccggctccgtgccaagtttctctgctacttcttcatgagacgcaagctcaaccacttccgcgttcagaaggtttttcactttcacgtcattgacctcatgatcgcctcttactaacacgagaacaaatcggtcatccgctttaaacagcattgatttgatgcaggcgctcggctcgatctgcaagaacgaagcgagctcttcaatgcttttgacattcggcgtatcaattttctccaatgcctcgggtgtttcatctgacggctcgctgttcatgacaacttccgccatttccgtattggctgcgtaagaggatccatcggaataagcgatggtatcttctcctatttcagaaagagccataaattcatgcgtgtcttttccgcccatcgcgcccgagtcggcaataacgggacggacgtttaattcacagcgtgcgaaaatgctgctgtatgcgccgtacatgttttggtatgtttcctccagactttcttcagaagcatggaaagaatacgcatctttcatgatgaattcgcgtccgcgcaataacccgaaacgcgggcgtttttcatctctgaatttagactggatctggtaaagagtgagcggcagacgcttataagatttcacctcatcgcgcacgagagaagtaatgacttcttcatgtgtcgcgcctaaagcaaattcacggccgtggcggtctttcagacgcattaattcaggcccgtacgtataccacctgcctgattcctgccatgtttcagcctgctgaagggccggcatcagcatttccaccgcgttgattttttccatttcttcacgcacgatcttctgaatgttttgaatgaccctgtaagccaggggcatgtaactgtaaaccccgctcgtattttgtctgataaatcccgctctcagcagaagcttatggctttttgcttcagcatcagccggcacttctctcagggtcggaataagcgtcaaactttgtctcatgtcttcgcacctctgattttttactagtcaattataagaataaacgctggatatcgttccatgtgacaaccagcataagaagcattaagaaagctacgccgataaatacgacaaatgcttccttgtcacggtttatcggcttgccgcgtattgcttcaatgaataaaaacagcagccgcccgccgtcaagcgccggtatcggcagcagattgacaattcccaggttgatgcttaaaaacgccgcaaactggaataggttgataataccggtttttgcaacttgatccgtcatatcataaatgccgacaggacccgaaagcatatcaagcttaaactggcctgtcacaagtttgctcagattggtcaggatcgcttttgtgacatcaacggtagatgtcgcgccgtaggcaatcgctgcaagcgcgcctttttcagtcggcgcataagagccgaagcggccgattgtttttttattttcatcttttacagcttcaggtgtaaccgagatatgaaacgatttgccgtcccgtttgacggcgacatcgattttttttccgggattttcttttaccgctgtcacgatgtctgtccatgacctcattttttcaccattaatgctctggatatagtcgccttcttttaaaccggcagccgctgcgcgtccattgtctgtcagcttcccgagctcaggctgattcgaaggcacgccttgaatgaatccaagcatgacgagaatgacatacgctaagatgaagttcattatcggaccggcagcaatcgccttaatccgcttccatacgggtttagacccaaattgtcgattgtaaggcgcaatctgcacttcttctccgtctacgataaaaaaggaggtctgactgacagtaaagcccgccagttcatcttctttcccctgctcgtacccggtaatcttcatttcgtgctcaagatcagccgtctccacctcgataattaaagcgtcgggatatttttccttttgattaatgatgactttttccacttcgtcatctttattaaaaagaagcccgacggtataaccgggtttgacttcgatcatctccgggtcttcaccggccatgcggacgaacccgccgaccggaaggagtctgatcgtatacacggtttcattctttttaaatgaaaagattttagggccgaagccgatcgcaaattcacggcaaaggattcccgctctttgggcgagcaataaatgccccagctcatggaaaaaaacgagcgttccgaaaataataataaacgcgataactgtattcacgaacataccaccttatgtgagtattgaattaacgtatccccgggtgtctttgtccacttcttggatatccgcaagactcggatcctgaattacgctgtggcggtccaatgctttttcaatcaggtcctcaatcgataagaatgaaatccgtccggcaagaaaagcggcaacggcttcttcgttggccgcatttaaaaccgtcggcatcgttccccctattttacctgattcaaaggcaaattgtaagcagcggaacctttcaaagtcagctttcgcaaaatggaggcttccgatctcccataattcaagcctttttgtttcaggcagaggcagccggtccggatatgtcagcgcatattgaatcggcaccctcatgtccggatttccgagctgggcgatgacgcttctgtcgtgaaattcaaccattgaatgaatgatgctctccttatgtaatacaacgtcaatctgttcatacggaatgtcaaacagccaatgcgcctcaatgacttcaagtcctttattcatcattgtagctgagtcaatcgtaatttttgcgcccatcgaccagttcgggtggttaagggcgtcggcaatcgttacagactcaagctcctgccgcgttttatctctgaaactgccgccggatgccgtaatgatcaggcgctcgatatttttgctctgttcgccttgcagcgcctgaaaaatagcggaatgttcgctgtcgaccggaagaagaggaacgccgtatcgttttgcgtgtcctttcactatatgcccggcagtgacgagagtttccttatttgcaagcgcaattgtttttttctgttcaatcgctttcaaagtcgggattaaaccgacgcttccaagcagcgcattgaccacgatatccacttcgtccatgactgccgcttcaatcaggccttcttctccgatgccgatttgacagtcatgagaaaaagacacttctttcactttttggtatgtatccatgtcgccgactgctacatatttcggctgaaacgttctgatcaacgggatcgctttctcggcgtttttaccgaaagtcatcgagacgagacggaactgatcttgatgcatgcgcaatacgtctaacgtctgctcccctattgatcctgttgctcctaaaagacaaatattcttcaaaatgccactcccattctatgcgtccagatcggtcttattttcatattagcctttctcatgaaaaaagcgcaagcagaaagtataagaacggcatgacaaacaaaaagctgtcaaatcgatctaaaatgccgccgtgcccgggaaggatttttcccgaatccttcacatcatagtgccgcttaagcgctgattcaaccaaatccccgatctgtccgaacacagacagaacaagcgtgatgaccaaaagaaccgggtatgaaatcggaaggtgcgcaaacagctgaaaaacagccgtaaaaataagggcgatgacaataccgccgagaaacccttcgactgttttgttgggactgatttcgggccacagcttccgcttcccgagcgactttccgacgaaatatgcgcctgagtccgttgaccatatgacaacgcaggcataaaagatatacaaaagcccgtttgtttcaatgtttctgatttcaataaaataatgaaaacacagtccgatatataccgtcgcgagaacgataaacccgacttcgtcaaacgtaaaggtgtttttcacgagcaccgtatagctgagcagaatcaatacggcgaaaatcgttacttccattttcgcatcgaaaaaatgatacttgtccggcatcatatacagccataacaacaagaggctgatcagacccggaaaagaaaaaaatctgagctttttcatccgcaaaagctcaaaaagcgctatacttcccatcacgtaaacaaatacggtgaacggcaatcctccgaaaataaccaaaaataaaaatagtgccgctgccagaacacctgttaacaatctttgtttcatttccaccatcctctaaattccgccaaacctccggccccgctgctgaaattctcccactgcctgcagaaagtgatcttctttaaaatcgggccacaggacatctgtaaaaacaaattcactgtaagccacctgccaaagcataaagttgctcaatctgatttctccgctcgttctgatgagcagctccgggtcctggagtgattctgtcattaaatgcccggaaaagagcgcttcatcaatgtcttcgatattcagcgtgccgcttttcacctgttcagccagggcttttgccgcattgacgatttccgtgcgtccgccgtagttcaaagcgaaattgagaatcagcccgtcattttgttctgtatcttttacggccttctcaatcgccctgtacgtatgagaagggagcgcggattcatctccgataattttcacctgtacattttcctctattaattcaggaagatacgtattcaggaactcttccggaagcttcatcaaaaagtcgacttccatcttcgggcgcttccagttctccgttgaaaacgcataaagagtcagaactttaacgccgagctgacttgcgagctttgtcaccctttttaccactttcattccttcatgatgtcctgcaatccgagggagtgagcgcttcttcgcccagcgtccgtttccgtccataataatggcaatgtgtgcgggaatttcacccttcagtatgtcttcttttgtataccgttctaagttggaagccgcattctgctgattcttccaatttttgagtatgttgagcatgagattcctccgtcacccaaaaaggttgcgttgctgatgatcaatgtaatcaacagtattaacaaaaaaaccccctgtaaacatgagagggtcttttcacattatctattgtacatagtttttcattaaacttccatgatttctttttctttgtcctttgtgacactgtcaatttttgacacatattcatctgtcagcttttgaacgtcttcactggaagcacgaagctcgtcttctgtaatgtctccgtttttctcaagttttttgaggtcatcgttgctgtcacggcggacattacggactgctactttcgcttcttccgcgtattttttcacgactttgacaagttctttacgtctttcttccgtcagagccgggatcgcgatgcggataattgtgccgtcacttgtcggcgttacgccaagatcagctttcaggatcgctttttcaatatcgccgattgccgttttgtcatacggtgtgacaacaagcatacgcgcttcaggcacattgatggaagacagctggtttaaaggtgtttgggcaccgtagtattctactgtcactttatccaatagagatgggttggcacgtcctgcgcggactgacgccaattcgcgtgaataagcggcaaccgctttttccatgcgttcttttgtttgtgttaatacttcgtttgacaacgttatttcccccttacgatcgttccgattgattcgccgattacggcacgcttaatatttccttcttccataatagaaaagacgatcagcggaatatcattatccatacatagtgaagaagccgtagaatccatgacttccagcccgtcttttaacacatcgagataagataatttttcgtatttaacggctgactcatcttttctcggatcagcattatacacaccgtcgacattatttttcgccattaagatcacgtccgcttcgatttcagcggcacgcagcgctgcggttgtgtccgtagagaaataagggtttcctgttcccgcggcaaaaataacaacgcgttttttctccaggtggcggatggcttttcttctgatgtaaggctcagcgacctgacgcatttcaattgatgtctgcactctggactgaattccgagcgtttccaggctgtcctgcagggcaagtgagttcatgacagtagcaagcatgcccatataatcggccgtcgcacggtccattcctaagtcactgcccgtttttccgcgccataagttgccgccgcctacgactacggccacttcgacgtcaagctcagcgatttcttttacttgtttagcgatggattggatgacagtcggattaatgccgtttccctgctctcctgccaatgcttctccgctaagctttaaaacgatacgattgtattttggtttttccataataacctccaagtgtaaacattgccgtttcctattatgcaagagaaaaaaaggtttgtaaatatagttttaaaaatagggaacacaagtagtgtcccctatactgcctgaaaagccgcgaaagattcgccaaggctttccgccattattttttcacttggttcataacttcttcagcaaagttttcttggcgtttttcaataccttctccaacttcgtagcggacgtaagttttaacagatgcgtttttcgcagccacaacttgtttcactttttcgtctgggtttttaacgaaagcttggtctaataagcaaatttcttcgaagaatttgttcagacggccttcaaccattttagctacgatgttttccggtttgccttcttgaagagcttgctgagtcagaatctgacgctcatggtttgcttcttcttcagacacttggtcgcgggagatgtaacgagggtttaccgctgcaacatgcatcgcgatgtcttttgcaagatcttcgtcagttgttccgctaagaacggataatacgccgatgcggcctcccatgtgaaggtaagcaccgaacgcttcgctgtcttcttttgaaataacagcaaaacggcgaagagtgattttctctccgattttagcaacgttgcttgtgatgtattcttcaacagtagaaccgttttccatcttttgacccatcgcttcttcaagatcagcaggagcgtttgcaagaaggtggtcagcaagcgtgttcagaagctctttgaagccttcgtttttcgcaacgaaatcagtttcagagtttacttctaagataacgcctttgttgccgtcagttttaataagagtagaaccttcagcagcgatacggtcagcttttttagccgctttcgcaattcctttttctctcagaaggtcgattgctttgtccatatctccgtcagtttcagtcaatgcttttttacagtccatcataccagcgcctgttttttgacgcagttcttttacctgctgtgcagtaatagccatttgaattcctccttatatgtgtaaacaagatatgtatagatacatttttcttgaaaaaaggtgataaaaggcagtccctcttatcaccttttgattaggttacgcagttgtcgtttctgtttcaggtgcagtctcttcagcagcttccgcttcttcttcgccttgcttcgcttcaagaatagcatctgccattttagaagtaagaagtttgacagcgcggattgcgtcatcgtttgcagggattacgacatcaatttcatcaggatcacagtttgtatctacgattccgatgataggaatgttcaatttgtgagcttccgcaacagcgatgcgctctttgcgaggatcgatgatgaataatgcatcaggaagatccttcatgtctttaattccgccgaggaatttttcaagacgctctaattcttttttcaattgaacaacttcttttttcggaagtacttcaaatgtaccgttttcttgcattttctcgatgtctttcagacgcttaatgcgtttttggattgtttcgaagtttgtcagtgtaccgcccaaccagcgttggttgacatagtacatgccagagcgtacagcttcttctttaacagaatcctgagcttgtttttttgtgccgacgaaaaggatttttccgccttcagcagcaaggtttttcgtgaagttgtaagcttcctctacttttttcactgttttttgaaggtcaatgatgtagattccgttacgctccgtgaaaatgtaacgcttcatttttgggttccagcggcgtgtttggtggccgaagtgaacaccagcttcaagcaattgtttcatagaaataactgacatgtgatttcctcctaataaaatggtttttttcctccgcttaggtcatttttgtgcagaactgccgtttgcagcaccctctgcataaatcgttaagcgtgtgtatttaacaccaagacataatataacacagctttatgcgacaatcaagaatcctttacagctttgccgcgaaattttaaaaacagctcgatttctgtctttccgctctgcatccgtttggcgatttccgcgggggtgagcccttgttcatataattctgaaacacgttcttcaaacgaatgcgcgccgctgttttcgtcactttcagcccgttccgttgcactgataagcttttccatgtggtccggaatatcaggctcttctttcggttccggccggggttcggcgtcttctgcggccggcgcttgacggctttttgcgtcttcgagtctttcattttcttctttcagctcaagcagaaacgctgcaagggtgttttccgtctcttcaagaatcttcttctgctggcgctccgtctccttgagggctgaaaacctcgtgtacagaataatgacggcataaagcagtacgccgtgaagcacaaagcttaaaagccataatagtgttgacatgtttttcactcgctaaccatgagttcattattgaattactttttcaagcaggtgctttaatttaaacagcgcctttgaatgaatttgtgaaatccgcgacgtcgaaaggttcaggacttgtccgatttcggtcaaagtcagttcttctttatagaataaactgacgacaagctgctctttttcagagagctcgtgaattttgcccgcaagctgagcgatcagctcgtccttcatgattttttcttccggcggcacatttttgtcatctctgatcatcacttgaatattctcaccgtcatcctggtcgtgaagcttttcatcaatggataagagattggcaaaaaacccttcattcatcgttgatactacgtcctgctccgtcatccccagctcttctgcgatctctgaaggcgtcacattccgaaggtagcgctgttcaagtttttcgattgccgcttcaactttttttgtcttctcccgtgaagttctgggcagccaatcttctttacgcagcccgtcgatgattgcaccgcgaattctaaacgaggcataggtatcaaattttaaatcccggccggggtcaaatttttccagggcatcatataaaccaagcataccaaggctcattagatcgtctttatgcaccgatttcggcagtccgacggaaattctgccgacatgatatgtgaccagcggcatgtaacggcgcattaaatcatcaccggctttaggatctttccactctttccagcgcgaccaaagcacctgatcttcataattcaaggattgcattgttatccccctacctcatacctttattaaatcgttgtttcaccttgtttaacagttcgaatgtgcagcatgcaggactttggctcaaattcaatcgtccggccgcttgagccgcccgtatcttcactgatgaccggaatgttatacaatgaaagctgctctttgatggccgctacattcctcggaccgattttcatcaggtcgttcgtcattttaaacttaaacatctccgctcccccggcgagttttgccttcagggcaaacttgcggcagccggctttcaaaagcatatcgatcgtcatcttaacggcggtgtccgcgtattttgcacggttgagctccgcagtttttgataaaccggagtccggcagcatgacgtgaacgagtcctgccgtttgtttgtctttatcgtataaaaccagccctacgcatgaaccgagtcccgaggttcggattttatccgggtaacgcgcgacttgaacatccgcaatccccactttaacgactgcggcttccgcacggctcataaagccgcacccaatgagatgaagagcttttcaaaagaatcatagtccgggagcataaacatgtgagctttgagctcctgccggctgccctggtcaaaaatagaagtatccacgacaatggcatgctctccgacttggctgagctccatcagcccttcactgataaccgcgccgaacatatcaagtgagatttccggcacgctcgggtaaatctcaagttttgtcaaatcagccaatgccgttaaataggaacctgctaaaatattgccgaactcatgtaaagcagaagaactcaaatgatcttcgcccaactggtcaatatcaaaatccggatttccgatcagctctctgataaactgttccgcctgatggaaaggcatgatgagaaagatagagccggtcatgtcgccttccattcttaaaaagatactggcgaccggcgtttcagccccgccgaaaaaatcagcgagctcatcaaatgtcaataaagtcgcaaacggcacttccatgtctatctttctgttcagcagctgagccattgcagaagccgagtgacccgccccgatatttccgacttcccgcaaaatatccatctgctcttctttgatcgcttcaaacttactcatgttgtcttttcccctttaagcattaggctctccggacgcagatgccgaagcacctttatccagcaccgcatgcgcatcgataatattgaggagcctgttatcttgcttaacgatctgtttaatccacacatccgtttcctttgtctggctttcaggcgcggattcgatttcattttcatgcacggtgatgacgtcattggcctcatccacgacccatccgacatcagcgtcacggtaagaaatgatgataatccgagtctcttctgtgatgtcctgttcaggctgattcagacgttttcttaaatcaagaaccggggtaatcactccgcgcagattgataacgccgcggatataagattccacacccgggaccctcgtcggtttttgccacttttcaattgatttcacctgggaaactgagatagcgtattctttcccgtttatcataaacacaatcattttttcacctgttttgatttcagcagtcattcgggcacctcctcgtgtcgttttagtagatcagcgcattacaatcaataatcagcgccacttctccgtttccgagaatcgtagcgccggaaatcgcaaagacgttcgttaaatagtcgccgagtgatttcagtacgacttcctgctgtccgataaaagagtccacgacaaaagcagtggatttatcgccctttttcacaacgattacatggaactgatcggcatcctgttttgaatccgtaatgccgaattcttttttcagatagacgatcggaacgatttggcctctgaaatcaatcacttctctgtcatgcgtctgcaggatatctttcttatcaataacagccgtctctataatagaagaaatcggtatcgcaaacgtctcttcttccagtttaatgagaagaacggatataattgaaagtgtcagcggaagctggatactgaaaagagaaccttggccttccgcggatttgacactgacagagccgccgagtgattcgagtttattttttacgacatccaggccgacgccccgccctgaaatgtcagaaatttgatcggcagtcgagaagcccggagcaaaaataagctcgtaaatctcattatcttcaagcgtttcagcatcacgttcggtgattacactccgctcgagcgctttttcaagaattttctttctgttcaggccggccccgtcatcttcaacctcaataaagacgtggttgccgctgtgatatgccttaagcacgacatggccagattccggttttcctttattcacccgcacttcaggcgattcaatgccgtgatcgatgctgtttctgattaaatggacaagcggatcgccgatttcatcaatcaccgtgcggtccagctccgtttcagctccgatgatggacaattcgatcttcttgtttaattccttttgaagctggcggatcattctcgggaaacggttaaagacggtttctaccggcaccatccgcatattaagaataatagactgaaggtcgcccgagattctggtcaggcgttcaacggtttcagtcagctcattatggtcaagctctttggcgatctgctcaagacgtccgcggtcaatgacaagttcttcaaaaaggttcattgaagaatccagtctttcaatgttgacgcgaatcgttttcgagccgctgtgatgcttcggctgttcttccgttttcgcttgcggcttaggctgtttctcagcctttttaaccggagcttccttcaccggttcagccgcttgcggtttttcggccgtttttaatggcgcaccggcagaaatttcgacattctccacttctgaaatgccgctgatgagttctttaatttcttcagcaggctgctttgtcaagaaacacacctgaaaatccgttccgaaatcttccgtctcaagcacttccgcggcgggtatcgtttttgcgacttccccggcttcattcagcttttcaaatatcatgtacacgcgcacggctttgagcatacagctttcattcagggaaaccgttatttcatagcggctgaatccttgctcttccgcctcttcaataacagtccgttcgaactcatcataattccattcagttgaagcctgttgttttgaagccggcggttctgctgtttcggctgaagccgcagtctcatgcaccgcatttacgtcgagcttcgcactcacttcagaaatatcacgtttgccgtctccaccgtcaataatggactgcaccatctcttcaagatgatcaagcgcttcaaacagcacgtccagccaatccgatgtaacgggcatttctccattgcggatagcgtccagcacattttccatcaggtgggttaaatgcgccagatctgtatatcccatcgttgcgctcatgcctttcagcgtatgggcagctctgaagatgtcatgcacaagctgaaggtctgccggatctttttccaacagcagcagcttttcgttacatgtctgtaagtgctctttactttcatcaataaagacatctaaatattgattcatatccaattgattcacaccctctcttttttcacacatccggtgatggatgccgcgatatcttccacatgtttaatctcatgaatgaggcccgcctttatcgctgacttcggcattccgaacacaacacaggattcgtccgattccgcaatcgttttaacgccgcctgttctgagcatttcttttacgccctcggttccgtcgctgcccatgcctgtcataatgacggccaccttttcgtaatcggataagcggcttgccgaccgaaacaaataatcggctgacggtttatgccggctttccgtatcatgaacgtcaagaatgatgcggagccttccgccttcctctgcaaccgtcatattttttccgccgggcgcgatgtacacccatccgtctttcgcttcttcaccgttttccgcttctttgacctgaatatctgacaaatggttgagtctgtctgcaagtgaagcggtgaagccttcaggcatgtgctgaacgacaaatacaggcgcctttaaatccttcggcagtttcggaatcaccttttgcagagcccgcggtccgcctgtagaggtcgcgatgaatacggcctgcttggcggattttgctttcggtctttcaaatcccgccaaagccggacgttccgggatagaagactctttcactgccgcctcaggtttttgtgcgcgggacagcccggctgcaatcaccctctcaatcagctgctctttaattttataaagatcaagtgaaatcgctccggaaggcttggtgataaaatcaaaagcgcccatttccagacagttgatcgttcggtccttcccttgctgtgtctggctcgataccatgattacgggaagtttatatatgctgatgatcttccgcaatgtatccgttccgttcatgaccggcatttcaatatcaagcgtgacaacatccggtttaagaagctctattttcttcagcgcctcttccccgtttctggctgtcccgatgacttctatctgcacttccgcagccagaaaatcggtaatcatttttctcataaaagctgagtcatcaacgacaagcacacgaatcactgtaaagtcctcctcaataaaaaagaagataatctctcaataaatgccggtttctcttctcttggtttgttttcttccgtttgaaacaagacatccgtcagaagacggacggacctgctggcttttgcttgaggactttttattaaaaaaggcacctggtcaatgacagcttgacttactagcgggtcatcgggtatggagccggcgaaacgcacccctgcgcctaaaaacgtgtgaatcgcatgagaaaggcggttgtacgtgtccagcgcctgtttttgggcgcgggcgcgattgacggcaatgtttacggtcagccgttcatccgcgagcaaaagatgtttgatcgcgctgtaggcatccataatggccgtcggctcaggcgttgtcacggcgagaatgtcttccgccgataaaataaacggcagctgttcttttgaaagtcccgctcccatatcaaacagaacgtaatcaaaatcgcttaatacagcggaaagaccactcataaaagccgtccacttctctccgtctgcttgatagatcgcctcaagccccgttccgccggatatgtagcgaaggcctttcggaccggaggaaagtgattgcgccaacgcgtgccgattctccatcacatcaataatggtgcgggaagaagcagcgccgatcagcacatcaatgttgcccattccgatgtcaagatcaatgatgagtgctttttttcctttttcctgcagggcaactgccatgtttaatgttaaattagattttccgacgccgcctttaccgctgatgacggctaatgtcttcgcttttttctcataaagctccggcttgatcatttgccgctctctcattttctttcttaatgactctgcctgatcgggtttcatgtcaaaagcatccttacaaactcttttggtgaagccgataggatgtcttcaggcacatcctgtccatttgtcaaataggcggcgccgattcttgattccgacagcacttgaaacacggagccgagtgaggcggtttcatccgttttcgtgaaaatgaattgattgaccggcacacctgaaaactgtttcagcacctgtttcatatcttcatattttgcagatgccgataatacgagaaaggattgtaagcctgattcaaacggaatcatctcttgtaattccgtaatatactgctcttctttaaagtttctaccggctgtatcaatgaaaacatggtcatattcagcgaatttttccagtgccttcagacattcttcctttgaatagcatacttcaagaggagcctgcagcagctccgcatatgtcttcagctggtcgaccgcggcaatccggtaagtatccgtcgtcataaaggcaatttttttatgctctgtcagcattgatgaggccgcgagtttcgcaagtgtagtcgtttttcctgccccggttgaaccgaaaagcacgacgtattttgattgaatcccttcctgccacctgtctgccgaagggagttttttcactaacaaatcctgcagttttgagctgacattttcttcagttaaatctccggaaacaattgaagaacggagcaattcactgagtacggcgttttgcgtatgatcaggaagcccggcttgcttcaatagtctctcggctttttttaatggttcagggagcacttctttaaaatgcgccagttcgccggaaatgctttgatccggaagacgcggcggctgaacaggctcagctttctccgccgtttccgtctttttcatttcttcagcggcagccggcggcgtttttctcgcttccctgacgtcacgatctaaaaccgctatcacttcgacggcctgctgcgaccgcagccccagccattttcgtttctttacttgtttggaatgtaaaataacggcatcattgccgagttcctttttgatttgcttcgcggcatcctgcattgaagcggctgtaaatttttttattttcattaaatatccaccactccaatgctctgtacttcaacatttgcttccagctcattataagaaagaaccggaagatcagggaaataccgttctaacagctgttttacatacattctgacagcaggcgagcaaagaagaatcgccgactcctggcggatggaaagctgctcggcttctttagcgacagaacggatgatgctgtctgaaacctcagggtcgagtgacaggtaattgccctgttcagtctgctgaaccccgtctgcaatcgctttttccacccggcctgagcatgtgatgaccttcagcgtttcatgctctctcgcatattgtgccgtgatttgtttggcaagcgactgtctcgcgtattctgtcaaaagatctgaatctgtcgttaatcttccgtaatcggcaagagtttcaaaaatagtcaccaagtttctgattgaaactttttctctcagcaatttggcaagcaccttttgaatatcgccgacagaaagagggtttggcgtgacttcctcaacaagcacaggataattttccttcagatgatcgatcagctgctttgtttcctgtctgccgaccagttcatgggcatgctgcttaattttttctgtaatatgcgtagatacgactgatgccggatcaacaactgtataccccagcatgtccgcttcatcttttgcagcttcgctgatccattttgcgggaagtccgaacgacggttcaatcgtttcaattccttcaatgacgtcatcttcaggcgtcggtgacatcgctaagtaatgatccagcaggagctctcctttagcgacttcattgcctttaattttcaatctgtattcattcggctggagcgcgatgttatccctgatgcgcacaaccggaatgacaagtcccaattcaagcgcaagctgacgtctgatcatgacgatgcggtcaagaagatctccgccctgccccgcgtctgcaagcggcacgagtccgtatccgaactcaaattcaatcggatcaatatgtaaaagctgcacaacgctttccgggcttttcagttcatccgcctgagcctcttcttcaagaatttcttcctcttcttcgctcggcttatccgttttggacagcctgtaagcgccgaatgctagcagaccggcgatcggccccgtcagcagaatgccgatcggtgtaagaagaccaagcaaaagaacagttcccgcggctacatacaagagcttcggataagcaaacagctgccctgtaatatcatgaccgaggtttccttcagatgccgctctcgtcacgacaatccccgtggccgttgaaatgagcaaggccggcatttgagaaacgataccgtcaccgaccgtcagcattgtaaagtgagaagcggcttcttgtatgctcatcccctgctgcagcataccgattacgattccgaaaataatattgatcatcacgatgatgatacccgcgatggcatcccctttgacgaatttactcgcaccgtccatggcgccgtaaaaatccgcttcccggccgactttttcacgtctgtgctttgcatcatgttccgtaatcatgccggcatttaaatccgcgtcaatactcatttgctttccgggcatcgcatcgagcgtaaatctcgccgccacttccgatacccgctcagcgccttttgtaatgacgataaactgaataataatcaagataatgaagacaacaagccctaccagcacatttccgccgacaacgaaattcccaaatgtctcaacaacctttcccccttctccgtgagaaagaatcgaacgtgtcgtcgacacattgagcgcaagccgaaacagcgtcaataacagcagcaatgacgggaatatcgagaattgcagcggttcttgcatattcattgtggtgagaagcacgatcaacgcaagagagatattaatgatgatcaaaatacttaacaaccatggagggaatggaatcaccagcattgccacaatgaggacaacacttattaaaaccgataaatctcttgttgacatgctgtttttctctccttttgaatctgaaattcactatactttttgtttcgttttatatacataagccaaaatttccgcaatgactttgaaaaactcttccggcacggcctggtcaatgtcaacctgatcatataacgcacgcgcgagcggcctgttttcaatcgtcatgacatcgtgttctttggcgatctgcctgatttttaatgcgagatggtcgacccctttggcaacaatgtaaggggcgtccattttcttttcatcatattttaaagctatcgcataatgggtcgggttggtaatgatgacatccgctttcggcacttcctgcatcatccgcctcatcgccatttcccgctgcttctgcttaattttggacttgataatcggatcaccctccgattttttgtattcatcttttatatcctgctttgacattctgatatttttctcatagtcaaaacgctgatataaataatcaagcccggccagcagcattaaagcccctgatcccgcaagccccatccaaagcgtgagcttagaaacgaaagtgagcacttccgcaggcgttaaaagcggaaggcggagaatatcgccataatgaagccagagcaccataaaggcggcaaaaccgaccacggtaatcttcaaaatggatttgaccagttcaacaatcgccctcatgctgtaaatccgcttaaatcctttcagcgggctgagcttattcaagtcaggcttgaggacttccgcagaaaacagaaaacccacctgcatgtaattgctcacaacacctgccacaagcgcgaccagcataatcggcgcgaggatgaggctgatatctttcaccgtatccacgaacagttcatgcacggcagatgctgacagatgtaacgatatcgatttcgtataaaacgttttaataaaggacagcagcctgtcccgcatataaggaccgagcgcgatcagcgaaagaaagataatcagtaaagaaacggctgtattcacatccgtacttttcgcgacctgtcctttctttcttgtatccttccgttttttcggagtggctttctccgttttttcaccggcaaagaattgcagattcagtctgagtctcatcatgtcacaccgaccaatgccaatagattccgcatggtttcaacggtaaggctgaagatgttgcggacaacgacaaacatcaccgccatacaaacgatcagcataataaagctcacggctattttcagaggaagcccgacaacgaaaacattcagctgcggcaccgttctcgccacgataccgagcgccaaatcaactaaaaacagactggccacaaccggcgcagacatttgaaaagcgataataaacatggcattgaagctttttgcgataaaaagtccaaagtgatcatttccaaacgacggaaatgcctgatcaagcgggatatactgaaagctgtaataaatcccgtccaataaaagataatgggcgtttacgctgagcataaataacagcgccagcgtataaacgaattgtccgatcagcggactttgcgttcctgattgcggatcaatcacattggcgatggaaaagcccatctgaaaatcaataaaggaacccgctatctgaatggctgtcatcatcatgaaagcaatcagcccaaggctcaagcccacaacggcctcttttatgacaagcagcatatactgttcccctatttctatttccggcgcatgtttcagcgtgctgaagcagatcaccgaaagaaaaaaagcaaagccgattcggtgaaccgccggcagattccgatgtccgaacaccggcaccgttacaaaaaaagcagagattctgataaagaccaataaaaaagcgggaaataaatcaatgatggaattcatttgattctaccctgcaaatcggttcagatgagagaacagatcagttgtgaacgaaagaatcgtcgacagcatccaaggaccgaaaaagatcagtccaagcatcaccgccacgattttcggaatgaacgcaagcgtctgttcctggatttgagttgtcgcttgaaagatactgacgagcaaaccgacgatcagcgcgatcgcaagcagcggcccgctgatcattagtgttacatatacggctttttccgccatggaaattacaaattctgaactcacaattagcacctaccctaaaagctgtcaagcaaagatttcacgattaaataccatccatcgaccaaaacgaaaagcaatattttaaagggcagagagatcataaccggcggtagcatcatcattcccattgacattaagacgctcgccacgaccatatcgataattaaaaacggaataaaaatcataaagcccatttgaaaagcggttttgagttctgatatcgcataagcgggcaccatcgtcgtcaaaggaatatcctgaatcgattcaggttttttcattttggcatagttcataaacagcgccagatccttctgccttgtatgcttgctcatatactctttaatcggcttctcggcttttgtatatgcttcatcgagactgattttgttgtccatcagcggcgttaaggcttccttattaatctctgaaaaagtcggcgccataataaaaaacgtcaagaacagcgcaaggccgattaaaacctgattgggaggcatgttctgcgtcgccagtgaggttcttacaaaagacaggacgatgacgattctcgtaaagcaggtcatcaaaatcagaatccccggcgccactgaaaagacagtcaaaagcagcagtaatttaacagtggagctgacttcggtcggactgtttgaattaaaaagattaataaattcattcatgatgataagggcctttcttctttccttcagaacggctttgtttcagctcgttcagctgttctttcagcgcttttgaaaacgacggaagcatcgtttgcggctttttttctccatccttacgcggatttacgagcttggtccattccacttttgaagacatcgactcttcgtattggctcagaatcgcctcgcgctctttttcatcttcaatttcttttaaaagctgtattgtttcgcccacaccgactacgagaacgctgtttcccactttaatcagctgcacggaacggttttggccgactgacgttccgccgatattttctacatattgaaacggcttcagcagacggtttcttctattcatcagtttgacaaatccatagatcagcagaatgacgaataataacgccccaatcatctttacaaaatcaaaagcggagacagaagatgcagaagcatcccctatctcttgatcagccgtttgtttcgatgtatcgctttttttctctgttttgtttgttgattgtttgtcaaaccattcgttgacggtggaattgtcagactccgccgcaaaagcagggaacggatgtacattgagtaaaacgaaacaacaaatcaaagctagtaaaccatgactctttttcaacagtcgtacaccctttagcttaatgttttattaatggcttcaagcacgcggtccgcttggaacggtttcacgataaagtcttttgcgccggcttgaatcgcgtcaataaccattgactgctggcccatagccgaacacatgatgattttcgcctgcggatcgatttgtttaatttcctttaaagctgtaatcccgtccatttcaggcattgtaatatccattgtcacaaggtcgggggaatgctctttgaatttttcgactgcctgcgctccgtctgaagcttcagctacaacgtcaaaaccgttcttcactaaaatatctttgatcatcattctcataaatgctgcatcgtctacaattaaaattctgtgtgccataatctgtttctctcctctatgttcgcttattttaaattgttaaggcggtctgcctgacttaaaatatcagtgactctcacgccgaagttttcttctatgacaacgacctcgccctttgccacgatccgctggttgaccaggatgtcaacaggttcaccagccagcttgtcaagctcaataatgcttcccgcagaaagttcaaggatttctttgacgcttctcttcgttctgccaagctcaaccgtaacggaaagcggaatatccatcagcatatcaaggttattccttgatccttgcgccgcttcgttatgatcaaacgcctggaattctaccggagcgacttgaacaggagcagctttttttgcggttccctgtctcttcggaagctcgggttttgcctgcggctccggctgcatggcaggttccggctgcggcgtttcgtatgtttgctgaggttctgatacggtttctgcggcctctgactcatgctggtctgcagtcatcaggtctgcgatcagatctttcgcaaacgtaatcggataaagctgcatgatgctcgaatcgattaattcgccgactttcagacggaatgacacttttacgagcaggtcatcctcaggtattctgtcggtccctttttcttccgtcacatccagaagttcaacccttggcggagaaatgtcaatctttttactgaacacggtcgacattgacgtagcagccgagcccatcatttgattcattgcttcctgcacggcgctcaggtggatttcaccgagtgacggatcggcgccccggccgtcccctccgatcatcaaatccgcgatgatggccgcgtcgctttgttcgacgacgagcaaattgctgccgtcaaagccttctgtgtagttcacttcaatggcaacatacggatgaggaaattcatcactgattttgctttttgaaatgacggtcacactcggggtcgtaatgtccactttttgatttaaaagagtggacagcgccgtagccgagctgccgaacgaaatattcccgatttctccgatcgcatcgcgctcaagttcagacaagttcgccccttgaggctgttctgtatcctctgattgactgcttgtgccgttaagaagagcatcgatttcatcttgagataatctattgttcatcttgttcacctcttatgtcgtgatctaaaatttgcactgcctgtcttcgattcacccggccggcctgccctaaaaacttcggtttgtttccgaccaatacagtaagaggatcagtcactgatttgtccagagttatacagtccccgacttccaaacttaaaaattcttctattgtcagttcagaagcgcccaagagagccacaacgggaatttgagccgtcatgatgcgcttttcaagcaacttcgtttcttcgggcttcgcttcattccggtctgattgcatccaataatgtacggaaagcttagggataatcggctcaagtacgacatggggaatacaaaggttaatgacaccgctgatttcacctatctgtgtattgagagaaatgacaacgactgtttcatttggggaaaccatctgtacaaactgaggattcacttcaaattcagtcatttcagggtcaatatcagcaatcgattgccaagcttctttgtagttgcccagtgcattttcaaataagttagaaataatattcgtttcaatttccgtaaggctgtcagctttgttatgagtgatgccgatgcctcccatgacgcggtcaagcattgcgtatgcgatggtgggattaacctccatcatgattctgccttccatcggatgaacatcgaataaatttaaaatcgtcatgttcggtatggaacggataaattcttcatatggcacctggtcaactgagctgacagatatatgaatatacgttctgagcttggcggaaaagtgtgttgtgagaagcctcgcaaagttatcatgtatccgggttaaactgcgtatctgatctttcgagaatctgagagcccgtttaaaatcatatacctttacttttttctctttaacttcttttttcagctcttccgcatccgcctcacccgtggaaatggcggaaagcagtgcgtctatttcattttgggagagaacttctcctgacattttcttcacctccgtattctgtcaaatttgtttttattgcagattaaaggaggtaatgtacactttctgaacttttccttcttggagatagctgtttactttctcttttaatgattgtttaaacgcttctcttcctttatctccctcaatctctccggcgcttgtgtcggctaaaatggaaatgatgttgtctttcacctgaaaatcgcgtttttcaagttcttccttcgctttagccgagtcggtttcaagcttgatgccgatacggatgatgctgtcagactttaagtttgtcgtaatatcgtcgacagacacagtggctgcaacgacttcgtcaattgtcggttttttatctttgtcggaatttccgctgacgacaaaatatgctgccgttccgaggccggcgatgacaattaaaataatcagcaaaatgatgactaattttttcttcattcttcttcctctattccctgatccagtgaaaatatttgtatgctatggtaaaacgatatgacttttttgagaactgcttcttccggttctttcactacgaactttttgccgttggacagtgtaatcgtcgtgtcggggaagcactcaatctgttcgataaacagcgcgttcagcgtaaaaggctggccgtttaaacgggtgacttgaatcatgcaatccggagaagcggcctaaccgcctctcctccctccttaccgtttcagattaaccagctcctgaaggatttcatctgaagtcgtaatgatttttgaatttgattggaaaccgcgctgagcaacgatcatttcggtaaattcatctgtcagatctacgtttgacatttcaagatagcctgccaaaagcttacccgttccgttttcgcccggagtggtgactgcgctcgcagctcctgaacttaatgattctctgtaaaggttgcctccgattttttccagaccggcgctgttagggaacgtgaccagaccgatttgtccggcatcatgaacctcatcccctgcatcagtgtatgtaaccgttccgtctgcaccgatgctgtaatctttcgcatcagtcggaatattgattttgccgccgccgattttttcaaggtagtacccgtcagtcgtaacaaggttcccttgattgtcctttccgaaattccccgcacgtgtgtaaacaattcccgcgcctgtattaatctgaaagtagccgtctccgtcaatggctaggtcggttttattctgtgtagcctgcggggcgccggttgaatgaacgacatcaatggaagaagtcgcggcacctaagccgatttgttttgaattggtcacgtttgaaccgccggcgactgtctggctgatcatatctttaaatgtaacgcggcttttcttaaatcctactgtgttgacgttggcgatgttattgccgattacatctagttttgtctgaaagtttttcatgccgctgataccggaatataatgaacgtaacatgttaaattccccctgggtttctttttatttagatgtttcgctgacggccgtgacattccacggactgacctctttgccattttcaagcacgagcacgtaattgccgtttgaatgcttgactgaattgaccgggcttgtctgatccttcccgtcgctgtcgctgaatgtgacatttttaccgatccagttcacatacatcgtaaacggatcttgattttctacaaatttagtcatcgtcgtattcatattcatcatttgctccaatgaagaaaatgtcgccatctggctgatgaattctttgtcatcaatcggattgagcgggtcctggttttgaacctgtgtcattaagatcttcagaaattcgtctttccctaaattcgtgctgctgtttactgcggaggtgctcttcgcgcttgaagtggttgaagcgcccgccgcggcataatccgagtttactgatgtcaactattcttcctccatttcattgagagaaagctcctccagcatatctccgaaatcgcctgactgctgctggttcttctgctctctctgtccctgatgctgctgtttattgtgatcggccgtctgcccgtaaacaggctgctgatccccgctttgaagcgggactgtaaaacggtcgacctggaccgacatattcggaagcgactgtttcagctgaggaagatgctgttccagcagctctttcgcggactggctggatgcgattattttgctttgaaacattccgttttcgtttgtcaccttaattgtgacaaatccgaggttctcgggattaagacgaatcgtaaagcttccggttgttttcccgaaaggcgtgtatttcatctgtttccagccgctgatgacctgatccgtcaacggtttattttctgccggctgctgttcagctcctgcgggcgtttgctgaatgccggcaaggcttctcgttcccgaaaacaggatatgtgcagacaatttgctgtcaggcgcctttgcgtgagaaaccgtgccgccgttttgctgttctgttttcccggctgactcttgggatgattcagatgattgagataacacaaaagctttcagctcagtttcagccatatcccattcctttgttcccttttgagagaggccagcaagctgctccgcgacgctttgaaagctcttcagctcagcggctgtcatggagtaaagtttagatgcagattcgtttttcggaaaaaatgtctgccgcaggtcttgaattacgcggtccggaacgccttgttttttcaatgcctctaataaacgggcgccttcctggtaaaccgcctttgcctgcgcgctgtccggcagttcctgctgagatgtgaagagctgagatacggcttcttgaatgaaaagcagccccttctcaagcgcatccttgacggaatccccgtcttttgcggaagaatccggctcatccgtttcaggcttcgccccatgctgttttcccgctaacatgtcttcaacagattcggcaagctgtttcaataaaggaagagctgtttcagccgtctgctttccttcaagagcttttaccgcctcaagcagctgttttagctgcaattctttatcttccgggccggctttcagccaatcaccgattttcgatagggcatcattcagctctgcgtcacttgtttttgtttcatctccgggctgccggggagaagtgatttccgacaggagccagttctgaaatagacctaagctgtttacattcatcttcacattgctgttttgcgcagtctgcgtacgattaccagttaattcaagcagcttcaacttacatcactccttatttccgtcagcggatagtttttctgtatatttagccgcttgttcaggagtcattttcgtcaagatttcagcaagctgctttttacttaatccgtttaaaatatcgagggcttctttttctttcagctttacgataatgcttgccgctttaccgctgtccatacttttatagatgttgatcatcttatcttttccggctgaatccgaagcgtcttttttcgtttcatccgtcttcgttttctgctgctgttcagcttcctgtttcagtgaacggattttctgattcagattatcgatttcggatttgcttgtgtctaaatctttattcaaaatgttaatttcacttttttgttcctttatggtcttttcaagagaagccgttctgtcttccttctgcttttccgccgcgcttttcatttctttcgtttcgggaaccaattcttttaaaacaggcgttttagcggctgtttcctgaatcggcttcatcacatcaacgccggcagcccaaaggatgatgcttgcgacgatgatcagaaaaatcagcgggatcatgataaaaagcaggattgaaccgaactttccagatctcttttctttatcggccatttcattcgctcctaatgcccctgaatcataaactgcttgattgaaatgtcgtccatttccctcatctctgcagctttgtcttcaagtgcgaacatattaaattgtttttcccgcattttttcaaatttctttacttcaatgtttttttcggtgagctgttcctgcttctcattcatttcatttcgtttcatgatgacaagcttttgataatgatagatggtgttctcaagattggaaacgaagtgctgataatgtctcatttcctgaacgctcatcccgcatttcagctttgattctttgtctttttcgagcaattcttttttgctcatattttcatatagtttttcagctactgtctcaaattcagaaaccgattgtctgtattcagtcaatgtttggtctttttcattttcttttaattccagcagcttttgaaatctgaattggtatgccacgatgtttattcctcttttcctgtcaggctcgtcaatgccgcaatgctgtcttccaattgagcaggttcttccgttccttgttttaaaaattgaataagctgcggataaaactgaatcgcttcatcaatttctcttgatgatcctcttttgtaagctccgatattaatgagatcttcagagttttgataagttgacagaagatcgcggaatttgttggccgcctctatatgcgatgtgtctgaaatatttgacatgaccctgctgatgcttttcaggatgttcacggccgggaactgccctttgttggcaagcgcccgatcgagaacgatatggccgtctaatattccgcgcaccgtatcggcaatcggttcgttcatgtcatctccgtcaacgagaaccgtataaaaagcggttatcgttccttgttcattcgcgcccgttctttccagcaaacggggcaaaatagcgaacacagaaggtgtatatccttttgttgtcggcggttctcccgctgccaggccgatttcccgctgagccatcgcgaccctcgtgacggagtccatcatgaacatcacattccggcctttatcgcggaaatactctgcaatggcggtggccgtatacgccgctttcaaacgcattaaggcaggctgatcagaggtcgcgactacgactatcgagcgtttcaggccttcttcgcctaaatccttctcgatgaattcacgcacctcgcgcccccgttcaccgacgagtgcgataatgtttaaatcagcttcagtctgcttcgcgatcattcccatcagggtgctttttccgactccgcttccggcaaaaatcccgattctctgcccttttcctaccgtcagcagactgtcaatcgatctgacgccgacacccatcttttcccgtatcggcgggcgtttcatcgggtttggcggcggctgctccgtcgaaacgggggacaaacctttcggaagcgcccggccgtcaagaggctcaccgaacgcgtcgacaacttgtccgattaaacccgcgcctactttaatgcggagcgactcgccagtggcctccacaatgctgcccggcgcgatgctggccgcttccagataaggcattagcagaatgttttcatcctggaagcctacaacctcagctttaatcgcttttttcgtatggcctttcggataaatgagacaaacatctccgattgagctttcgggcccttttgattcaatcatcagcccgatgacccgtttaaccttgccgtagcgtttgtacggatccgctgtttcaattgagtctattaaatactgtgtcttcattgctccgctcccgcctcaagcgccgttaaaagtttttgctttaattgcatcagctgggtgtctatgcctgcatcgacacgtccgaacggagtttctatcgagcacgttcccttcgcggctttttcatcggcatataagcttaatctgcattctttgtataacagctgctgaatttcgtccatatgctgatgaaccgtctcataatattcagggtccacatagatggagatgtcatcataatcttttacttcggctactacctgcttgaccagcagaaggaaagcctctttatcatcacttttttgccgccatacttttttagcgagcgcaacggaaagctcaataatttcttcctcagcgctttccagtttttcctcgactgactgtctcgccatttccataacggcattggcccggctgatgagattagcgtattcagcttgagcctcggcttttcccaatgccatgccttcttcatatccttctgcctttgcttcttctatcaatctttgtttttcttccgcccagcggtttttctcttcttcaatctgccgaagagtgtgctctaattgatttttcgcttcttcagacaccctgtcggcttctgctttggcaaaagccatgagagcctctggattttcgggttcctcccggtctggctgggaatgtgttttcctgacttcctgcaaggaaagcttgcgccgtttttgttcaggagaaaatgatgattgctgtttaatgatattagacaataatatcgtctcctccgcctcgcgcgattacaatttcaccggcttcttccagcttgcggacgacgcccacgattcttgattgcgcctcttccacatcacgcaaacgcacaggccccataatctccatttcctctttaaacgtttcaaccatacgctgtgacatattgctgaagacgatttctttgacttcctcgctcgcaaccttcaatgaaagcaggaggtcgtcgttttcaacgtctctgatcacgcgctgaatcgcacggttatcaagggtgacaatatcttcaaagacaaacatccgttttttgatttcatccgccaactcaggatcttggatttctaatgaatcaaggatcgttttttccgttcctctgtctacgccgtttaacacttcaacaacggcttctatgccgccggtctgcgtataatcctgcgtaaaggaggaggacagcttttgttcaaggacccgctccacttcatttatgatttcaggagacgttctgtccataaccgcaatccttcttgccacctcagcctgaacgtccgggttcagctcagacaaaatctgtccggcctgcaccgggtcaaggtaggataaaatcagcgccatcgtttgcggatgttcctgctgaatgaaatttaaaatctgttcgggttccgcttttcttgcgaagtcaaacggctttacctgcaaagaagaggtgagcctgtttaaaatgcttaccgctttgtcttctccgagcgctttttcaagcacttgccgggcgtaatttaaaccgccttgtgaaatatagtcctgagcgattgcgatattatgaaattcttcaatgatttcatcttttctttgatgatcgacgcttctgactcccgaaatctcgagtgtcaatctttcaatttcttcttcagacaaatgcttgtatacagaagctgatacatcaaggcctaaggaaatcatgaggatggctgctttttgttttcctgtaagcttgttctgatcacgtttcgccattttccattccccctaatcctcgtccagccagcttcgaagcaatttagcaaagtcttccggtttttctttagccattttttcaagctgttttcgtctgactgtttcttccgtttcaattttctcttcgttgatatcaggcaatcgaaccggctccggcggtgtttcatattcatattcttcgtattcatcctcttgtgagcgtttctttctgatgaggagaataataagcagaataatggccgcaagcagtacgccgcctgtaatgtatacccagatcggaagacctgaagattgtgccgaatctgtgttcaggcttgtttttccgtcaaacggctgaacggatacaacgattttattgttgatatcattgtctgtcaggttttgattttgcgtttcgtttttatcaagagacgttctgacgaccgttcctaaaatcttctgtatatcagcctgtctctgtgctgataaggaagcggcatttttcggattaggcggctccaccatgacctgaatgcctaaatcacgcactttatacgggctttcagcgatttctttatggatgcggttgacttcatagttgattttattgctgcttttttcgtagtccccgctgtttgaaccgccgtttgtctcggcatagttcgcggtgtcattgcttcccgttccggccgtgccgccgttggccgcgccgtcgcctttgtacgtttccgcaactttttcggcgcttaccgctatgccttccatgttatctttatcgacaggttcgacagtgtcttcagtgcgtttttccttcgtgaagtcaatatccgccgttacggaaacaacgaccttatcttgccccatcattgtgccgagcagtgactgaacatgtttttgaacgtccttttcgacctgcgacttaataccttgctgagaagcataactgtcagaaacggcccctgcaccgccgtcacttttgtcataatatgtagaattttgatccattatgacgatattatcttcttttaagttcggaacacttttagaaacgagatggtacagcccgttgatctggttttgatcaagcgagtagcccggtttaatctgcaaaacgattgaagcggatgctgccggctgatcttcaccgacgaacacggcttctttcggcatattgatcatgaccttcgagcttttaataccgtccatttcatttatcaggtttgacaattcggtctgagtcgcctccacctttaaaacgtcaaactcattatctgtcaggccgaagcccgcattttgtccgaagaacgaataatcaattgatcccgttttcggcaggccttctgcggcaagctggactttaagcgaatccacttggctctcaggaaccttaatgaccgtgccgccgtcagcaagttcagaagacacctttttcgtatcgagctcttctttaatcttccccgcttcttccgcggacaaatctttataaagaggcaccatcttttcagacgaagtaaaaataataacgacgatgagtaaaataatgaatgcggccaagccgcttaccatgagtatcttctgtgtttttgatctgttgttccaaaacgctgccgttttggttttcatttgcattagagtacgattcatgttaacccccggtcattccagtcattctcttcaatctgaccactacatctgcattctcatgatttcctgataggcttccacggctttattgcggaattcggtagcggccgtcagagaaatatttgctttttgggcagcgatcatgacctcgtcaaggtttacatcctttcctgcagccagttcgttcgttatttggtcagattttacttgtgactcatttaacgaatcaatagagttttttaaaagctccgaaaagcttgtttggtttgaagaatcagttttttgagtttggtttaattgattcgttacgttttgagtgttttggatttgttgaagctgaaaaggagtaatagcgttaaccacttacatcaccttactttccgatttctaaagccttcaaaagcatgcctttggaggcgtttaatgcagttacgtttgcttcatatgatctcgagctgctgacaagatccaccatttcctttaatggatctacatttggtttttgtacatatccgtctttattcgcatcaggattctccggatcataaacgagattaaaagcggacgggtcttccgtaacaccagatacctttacgccacttcccgcgcttcctgttccgttcatcttggaatgtaaaagggacgaaaatgattcgcctccggattggagagataccagctttcttctgtaaggcacccattcgccatttacctgcttcgctctcgttgtatccatattggccaggttggacgatacgacatccatccggacacgctgtgcagttaaagcggaacccgaaatatttaagctttgaaagccactcattattttcctcctgtcaagacggttttcagagaattgaatttgccgctcattctttcaaccaaagcctgataattaatttggttttcggctaaatctgtcatttctttgtcgatatcgacattgtttccgttttgctggtacgatgtatcactgctggacacgatagaataatcgtcccccgaacccgtaaagtcaacgtgccgatagtcggtttttacagcctcaagattggatgtttcctgatctaacaaatttcggaaagagactttttttgccttgtagttcggtgtatctatattggcgatattattagttaagactttttgcttaatgtccgctctccccaaggcattctcaagattttgtatagttccagaaaataagtccaaatccacttacctccatttcagatatttttctcctaaaaatccttgtcgagaattgtaaaaccatatgcttattgtaagaaataacaggcttaaagtctatgaagttaggctaaaaaaaagtgctcaattatatctattttgtatgtaggtattaagtcctagaatatttgtactacaaggatttgtttaatattagactgaaaatagcagaatttctgtatcttcctccttttttcacacagcaagatggattatctcagatcagattccaataagcaactttaaactgcaacttttcacctattgtccataaaaaaagcaggacgcccatttttagggatcctgcttttgtcttaatgagatttaaggttttccaattcaataaggaatttgttgttcagaactttaatgtacgtccccttcattcccagtgatctggattcaatgacgcctgcgctttccagctttctcagcgcgttaacgattactgaacgcgtaatgccgacacggtccgcaatcttacttgccacaagcaagccttcgtttccgtcaagctcttcaaagatatgctcaatcgcttcaagttcactgtaagacagagaactgatcgccatttgaacaaccgctttgcttcgcgcctcttcttcgatttcttccgctttttctcttaaaatctccattcctacaacggttgctccgtattcagcaagaatgagatcatcatcttcaaattgatcctgcagacgggacagaatgagcgtgcccagtctctctcctccgccgatgatcggcacgatcgttgttaagcccgcttggaacaggtctctgttttctacaggaaacgccgtgtattcgctgttgatatcaaggtttgaagacgtctccggaacattgaacagatttctcgtgtactcttccgggaactggcggtcttcaagcatttttttcatgcggtcattttcaatctgctgattaatagagtagcccaaaagctttcctctgcggctgacgacgaaaatattagaatcaatgacgtcacgaagcgtttcagccatttctttaaagtttacgggtttgcctgccgcagcctgcagcatgctgttaataattcgtgttttttgtagtaaagccatgataaataatcctcctagaattcctcttattaaattttcacaatataaattgacttagatctttgttgtttgcaatcgttccgagcttttcttcaacgtattgcggcgtgatagcgactttttccatcgtcacgtccggcgcttcaaacgacaggtcttccaagagacgttccaatatcgtgtgaagccttctcgctccgatgttgtccgtatcctgattcacatgataagctacttcggcgatcttacgaatagcttcgtcagaaaattcaagagatataccttctgtctgcaataaagcctgatattgttttaacagcgcgttatcgggttcgacgagaatcttcacaaaatcatctactgtcagcttgctcaattctacacgaatcggaaagcggccctgcagctccggaatcagatcagacggtttggccatatggaatgccccggctgcgataaacagcacgtgatctgttttgacggagccgtatttcgtgacgacggtagatccttcgacaatcggaaggatatctctttgaacgccttctctcgatacatctgctgaggaagaagcccctccgttttttgcgattttatctatttcgtcaataaagataatgccgccctcttcagctcttaacacggcctcttggccgacttcatccatatcgattaatttgcctgcctcttcattggtcagaaccttccttgcttctctgaccgtcattttgcggcgttttttcttttttggcaccagattgctcagcgcatcctgcatattcatgcccatctgctccatcccggagccttgcagcatgtcaaacatcgacggctgctgctcttccacctctacggagacgtaatggtcttcgagctctcccaatgcgagctgatgcgccatgcgctttcttttctcttcaaggcttgcttcttcctgctggtcggcttcatcatcatttgccgcctggcttcctccgaaaagcatttcaaacggatttttcacacccgcttgttttttcttgcccggaacgagaagccgcactatacgtttgtttgcattttcttcagcctgttctttcacttcgctgattttttcttctttaatgagccgaactgatgtctcaacgaggtctctgaccattgattcgacatctctgcctacatagccgacttctgtaaattttgtcgcttcaatttttataaatggcgcaccggtaagcttggcgatccgtctggcgatctctgttttccccaccccggtcgggcccatcatcaggatgtttttgggaacgatctcgtctctcagtttttcatcaagaagacttctgcgatagcggtttcttaatgccacggcgacagcttttttagcatcctgctgtcctacaatgtattgatccaaccgatctacgatttgtctcggtgttaacggtttgttttccatgcgcctcaagtcctttctattcaagttcttccaaaatgatctgatcgtttgtgtacacacaaatctcgcccgcgattttcaaagcggcttttgcaatatctttggcggacagattctctccggcataggttttcagcgctcttcctgctgacagggcgtagtttccgccggagccgattgccaaaatgccgtcatccggctcaatcacttcacctgttcccgatacgagaagcaaggtatcctggttcatgacaatcagcatggcttccagcttgcgcagcactttatcgctgcgccattctttcgcaagctcaaccgacgcacgttttaaattgccgttgtattcttcaagcttcgcctcaaacatttcaaaaagtgtgaaagcgtctgcaacagatcctgcaaatccggccagaacctttccgttaaacagctttctcacttttctcgcggtatgtttcatgactacagcctgaccgaatgtgacctggccgtctcctgacatagcgcttttcccgttatgctggacggcaaaaatcgttgtcgcatgaaaagatgacatgagaagggcctccttttaattttctttaaaagctctcgggtggtgggacatatatgtgtttctcagcatttccttcgatacatgcgtgtatatctgcgtagaagacagattggaatggcccaaaagctcctggacgcttcttaaatcagccccttcattcagcagatgagtcgcaaacgtgtgccgaagcatatgcgggtgtatatgtaaagtgccggatgctttttttacaagcccgcttaaaatataccggattcctctggcggtcagcgggccgcctctttgattgacaaacagcacatcatgaggctcttttgctttttcaagcaggcactgccttccgctgttaatatacagctccagcgcatcacgggcatatgagccgaacgggatatagcgctgcttcttgcctttcccgtgaacgagcaccgtatccatgaacaggtcaagatcgccgacagtgagcgtacagcactcactgaccctcattccggtcgcataaagaagctcaagcagggcctgatcgcgcatccctgacggctgacttctgtctgaaacagcgaatagttcctcaagttctttttcataaagaaacttcggaatccgtttctcttgtttcggcagatgaacaagctgaaacggattctcttcaacaagcttttccctcattaaaaatttatagaagcttctcaaagctgaaattttcttgctgattgtttttcttgacaggcctttttcataagcctctgtcaaaaatattctcacatcatgatatgcagcttctttcattccatttatattttgagcatgcagaaacatcccaaattcttcaatcgaattaacataattcacaatagtatattgtgaataatttttttcaatttgtaaatattcaacgaataactttaaaaaaaagttaacattctcagtcattatgaagacctccctctccgaagggcttttaaatggtatcatataatgcatcgaagttgcaatgaaaagctatatcgttttcgaaatagtttgaatagtttcaattgcgcgtttagcgtattcttcatttcgttcttttttgtttttaatttttacaggcaattcttttaagaggccgaagtttgcattcatcggctggaagttcttctgatttgtcgtcgtaatgtagtgagccatgcttccgatcgccgtctcctgcgggaatgtcacaagatcctgaccgagcacaagtttggcggcattgattcccgctacaagacctgaagcggcagattcaacataaccctctacgccggtcatttggcccgcgaaaaacagatcgttccgctgtttaaattgatatgtcgggttcaaaaggctcggcgagttgataaatgtgtttctgtgcatgacgccgtatctgacgatatcaacattttcaagaccggggatcagtttaagcacttctttttggtctccccattttaaatgtgtctgaaaacctacaatattataaagcgttcccgccgcatcatcctgtctgagctgaacgactgcataagggcgcttgcctgttttcggatcttccagtccgaccggtttcatcggtccgaacagcatcgttttcttgcctcttttcgccatgacttcaatcggcatgcagccttcaaagaagatttctttttcgaattcttttaaaggtaccgtctcagccgtcgtcaatgcttcatagaaacggtcgaactcttcctctgtcatcgggcagtttaagtacgccgcttctcccttgtcataacgggattttaagtagactttctccatatcaaggctgtctttttcgacaatcggcgcagccgcgtcataaaaatacagatactcttctcccgtgagctctttcagctgctttgaaagcgattctgacgtaagcggtccggtcgcgataacagtcgggccttccggaatctctgttacttcctcagtaagaaccgttacgttcggatggtttttcacaagatccgtcacgctttgcgcaaattcatgacggtcaacggcaagcgctcctccggccggaaccgagcatttatcagcagattgaatgattgccgagtcaagcgcccgcatttcttcctttaatacccctaccgcattggcgagtgtatttgaacggagggagttgctgcataccagttcggcgaatttatcagtatgatgggctgccgtctgcctgacgggccgcatttcatatagtttcacttgaattcctcgttttgcaagctgccatgccgcttcacttccggcaaggcctgctccgattacattaactgtttgctggttcatttcttttcatctcctgttgtttgtcccttccacacaaagaaggtgagcaaggctctgctcaccgctacttctgtggttcttccttataatcgcattcgacgcattggacttgtatgccttttttaagctttttctctacgagcatattttcacatttcgggcattttcgttcaatcggtttgtcccaagatacgaagtcgcattcaggataacggtcacagccgtaaaagatgcgtttcttttttgattttcgttcgacaatgtttccttcatggcacttagggcattttacgccgatttgtttgacaatcggttttgtatttcggcagtcagggaagttggagcacgccataaatttgccgtatcggcccattttataaaccatccgggagccgcataactcacaatcttcatcggcgtattcaggttcaatttccacttctttcatttcggcttccgcttttttcacgcgtttttcgaaatcagtatagaagctgtcaatgatttgaacccattctgtctggccatcttcaacatggtcaaggtctctttccattttagccgtgaattcaacgttaatgatttccgggaaaaactccatgataagatccagcacgatctgcccaagctcagtcggcacaaaccgtttattgtctaatcccacgtaaccgcggcgctggatggtgtcaagagtcggcgcatatgtcgaaggacggccgatccccagttcttcaagcgttttaaccaggcgcgcctctgtataacgcggaggcggctgagtaaagtgctgctcaggctcaatatctttcgataaaaccgtgtctccctctttaaggtccggaagcatgcggtctttttcttccagctgatcgtctttaccctctacatagactttcatgaagccggcgaatttgactttacttccgtttgcccggaatgtcaatccgttattgctgagatcgacgctcatcgtatcaaggacggcaggcgccatctggcttgcaacaaagcgctcccaaatcagcttgtataatctgagctggtctcttccaagcaccgcttttaagtcggcaggttttctgagcaccgaagtcgggcggatcgcttcgtgggcatcttgagcgttttcatttttctttgccggtttccgttttcccgctaagtactcttttccgtacgcctgatcaataaaagctgacgcttcttcaacggctgtgttggaaatccgcgttgagtccgttctcatatacgtgatgagcccgactgtcccttctttgccgagatcaattccttcatataattgctgagcgatcatcatcgttttcttcgctctgaaattcagctttcttgcagcctcctgctgcagagtggacgttgtaaacggcagagcgggatttcgtttgcgctcttttttcgtaaccttgtcaactgtatacttattgcctttcagctgagcaaggatggcttttacgtcttcttcgctttttaaaggaagctttttgccgttttttccgaaaaatccggcttcaaacgtctcttttccctttaaaaatgagccggtaatcgtccagtactcttcaggtttaaagtcgttgatttccttttcccggtcgatgatcagccggagcgcaacggattgcacacggcccgcactgaggcctttttttacttttttccaaagaatcgggctgattttgtatccgacaagtctgtctaatatgcggcgcgcctgctgcgcatcgacaagatccatattaatcatgcgcggatgtttaaatgattctttaatggcgtctttcgttatttcattaaagacgacccggcagtccgagctgagatccagatcaaggctgtgtgcgagatgccatgcaatcgcttccccttctctgtcggggtcggccgcgagatagactttttttgctttctttgccgctgtttttaattcttttaaaacagggccttttccgcggatcgtaatatatttcggttcaaagttctgttcgatgtcaactcccatttgacttttcggaagatcccggacatgtcccattgaagctttgactttatatttcttccctaaataacgttcaatcgttttcgcctttgccggcgattccacgatgactagataatcagacattttcatccccctcaagaggtgttctctctcttttcaagtatcaattcattttagagctgcctttttatggctttcaacatttcattctttatgatgaacgtcattttatacatgaaaataatgtgcaactttaaatcctcactattattaaatattacaataccgtttgtcaaacgatatttcaaaagggttccgtatactgaacgcatcgggcggtcagctctccgtcaatatcctctgcgcataatacagctttcgccccttcttgaatgagttttataggtcctccggaatatggattaaatatggaacccggaacggcaaatacctctctgccttgatcgagagcctggtaagctgtgattaatgaaccgcttttttcttttccctgcacgaccacaatcccttcacttagtccgctgattatgcggtttctcatcggaaagtgccattttttcggctttgtttcaggaggatgttctgagagtaggagatggtgttcagccatgtattctgctaacaggagattttcccggggatagatgtgatggaatccgccggctatcacgccgatcgtaagcccttttgccctgatgctcgccttatgagacaatccgtctataccggatgcaagcccgcttacaatgacccagcctttttttgagagttcggcggaaagatgcccaaccgcttttattccgtcttccgtcggtttccgcgttcctacaatcccgatttttctgccttttttaagaagcagcgtgttcccttttgcatacaagacagccggcggatcataaatcgctttaagccatgttggatagcggcttgatgaaatcggaatgacagtaatgccttcgcggcggtaatcggacagaacttcatcaagttccggatccttgcgctctatttcccgaaaaattgcttccggggctgttttcccttctgataaaacagttaatggatgcggatccggtaaaaaagacagagagtgatcagctttccaccattttaatagaagagacggggaaatgatttgattaatactgcagaccattaaacagcgcgatgcttgatccaaatctggaaacctcctctttttttcagcaaaaacaggaacagccgttacggctgcccctgcttcgatcagtgcgttttgcacgtttcaaataagcctttttcttttaacaccttaatcagcgtttcacccattacagaaggggtttccgcgacttcaattccgcaggcgttcatcgttttgactttttcttctgccgtgccttttcctccggagatgatggcgcccgcatggcccatgcgttttcccggaggcgcggttttaccgccgataaagccgacaacaggcttcgtcatgttcgctttcacccactcagccgcttcttcttcagctgtgccgccgatttctccgatcatgatgacggcatgtgtctctggatcttcattgaacgcttttaacacgtcaataaagttcgtgccgttgaccggatcgccgccgatccctacagcggtagattggcctacgccggcttctgaaagctgatggacggcctcgtatgtcaatgttcctgaacgggatacaacgcctacatgaccctttttatgaatgtatcccggcataatgccgatcttgcattcttcaggtgtaataacacccgggcagttcggccctattaatcttgttttcttgccttccataaagcgcttcactttcaccatgtccaaaaccggaatgtgctcagtgatacaaatgacaagatcaatttccgcgtcaaccgcttccataattgcgtccgccgcaaacggagccggcacgtaaataactgacgcatcagcgcccgttgtatgaaccgcttctgcgaccgtattgaataccggtacgccttccgcttccgttccgccttttccaggtgttacaccgccaacgatattcgtgccgtattccagcatctgctttgtatgaaataaagcggtagaacctgtaatcccctgtacaataactcttgtatctttattgataaaaacactcattatctggtcccctgcctttcattctttcctaaactaaggatacgattttctgtgcgccgtctgccattgattccgcagatgtgatgtttaagcctgattcattcaggattttctttcctaaatctacgtttgtcccttcaaggcgcacgaccagcggcaatgtcaatccgacttgtctcgtcgcttcaacaacgccctcggcgatgacatcacacttcatgatgcctccgaaaatattaacaaaaattccttttacgttttgatcggaaagaatgattttaaaagcttccgtaactttttctgcggttgcgccgcccccgacatcaaggaagtttgcaggttctccgccgtagtgtttaatgatatccattgtagacattgcaagacccgcgccgtttaccatgcagccgatatttccatcaagggaaatgtagcttaaatcgtattttgacgcttcgatttctttcggatcttcttcatctaaatctctgtattccataatgtctttttgtctgtataacgcattgctgtcgaagttcagcttagcatccagcgccatgacgtttccgtcccccgtaacgacgagagggttgatctcggcgatggagcagtccttctcaacaaatgctttatataagccgagcataaatttagcggctttgccgacaagctctttcgggatgttaattgcgaatgcaatttcccttgcctgatagccctgaaggccgattgccggatcaattaccgcttttttaattttttcaggtgttttttccgctacttcttcaatctccgttccgccttcttcagacgccattaaaacgattcttgaagtagcgcggtcaagtacaagcccgacatagtattcctttttaatatcgcagccttcttcaataagtaagcgttttattacttgtccgtccggacccgtttgatgtgtgacgagcgtcttgcctaacagttcttcggcatactctttcacttcatcttttgtttttgcaatctttaccccaccagctttgccgcggccgccagcatggatttgcgcctttacgacataaaccgagcttgacaggctctctgctttttcaactgcttcctctgctgtaaaagccactttaccttcaggaacagacaccccgtattttctgaggacttcttttccctggtactcatggatattcatttcccatcctcctaacttatgtagcaaaactaaaaatagactgcgctttcattctatataatactggaagaattgtctagggttcaaaacaaaatctttatatccttccaaacattctaacttttattttattgaaaatataaatttaaacggagtccgggaaatgaatggtccttatttttcgtttttcaaggtttcgtccagtctgtaaacaaatgaaaaaatttcggcaacggtttcataaagcgcctccggtatctgatcgtcaaccgtcaaatggcgcattaattcgacaagggttctgtcttcctgaatgggaaccccagccttctcagcttcttttataatattttccgccacgtgccccctgcctgttgcgacaaccttcgggacttggtctttctgccggtcgtaatgcagagcgacagctcttcttaacggcgtttgctctttcatattttcacatccacttttcttccgccgtctttttctataaactcttccacaagagcgctctggtcttttgggcgccgttttttagccgtgacgcctgacaggctgaagcccgtttcttttacggcttcttttaaagccggtacgagagggtcgatggccgcctgaagctcaaaatcagtctcaaccgtaatggtcattacattttgctgaatcatgcagtccacaacggtttcttgcagtgtttcaagatgcagcaaaaacaggagcctgcaatgtgacggatcgagttttccgtccggcttcttccgtcctttaaagagaactgtgatgtcattctcatacacggacgctcccagcggaaatgacagcaccatctgcgtaaaagaagggttatgctgctcaataaacagctggccgtttaatttatgaagaagcggttccgcttcttgtttaacggattggggcgcttcttgaagcgtccggacggcttggagggctgttttcagcgcttgtttctccggctgcggagacacgcctttttcaagcgctgtaatgaatgataattcatcacgcgtgcccagtccttttttgattttctgcaaaaggcttaatacatcatgtttttccgcatatttcaattcggtgagctgagcggctttttcgaaaacagccgcctcctgttctgtcagatgtgcgttttgaagaacgggtgttgttttcaatgttttttcttgagaaatgaaagccttcatgatctccgccgttacttttacgggacggttttcagttttttctgccgatgtcattaatttctctataatctgttttgccgttttttcaggcagttccggatttgtccgtgcactcggaggagaagattggcttgagactgcctttccgttttctcgagtctctcggacaaatggtgattgttttgattccgtcggttctccttcattcatcagcctggtttctgagagcggcatgcgtgcagcctcggcaagcttcttcaagagacgttctgcatgaagatccgtttccgcgtttaacacgtcagaaaccgcctctttgagcacagacagctcttttgccgattgcggagcctgattgattgcctgaagcagtcctgagaggaggcgccgggtcggaaccggatatttaacggcatgaatggctgacaagacttccggatgtgcgggcagttcccgtttcagcgcaaatacgattgtttccgccgcttttttcaattcggcggccggaagcgattcagcccagcggatgcaggctttgagactgttttcagtcatcggcagcttctgctgcataaacgtttcggcaatctgcagagacacagggcccggtttgacagaaagagcggttaacagtcttcccgccgcttcccgaacggttttcgggcttccttcgaattggtcaatgacatgaagccggcccgttttttccgccggctgtttgtcataagaaaaccagtaatacgcctgcggacgaagggcggtttcaagttttccctgcatcgtccggccgccgatttggataagagcgctttgatcgtccagcaaacggagaaccttccctaacagcagcctttgagcgccgctgtctttaccgccgtcctgccggtccggagggatttccgccgtcagctgtctgaaagccgcttggatttcgccgcttatgttcatgtcttaagcctcttttctaacaataagattgaacgggagcgaacgtttttcggtgaatagttgtcggtccgtatgcctgaagagcttcaagatgttctttcgttccgtagcctttatttttttcaaagccgtacatggggtaggttttggcgtactcagccatgagacggtcccgcgttacttttgctatgcaggctccggcggcaattgacacgcttttggcatccccttttataactgatgactgcggaatgtcaagcggaagggtcatggcatcaacaagcagataatcaggtgtttccgttaaagcattgacggcttttaccatcgccagtctcgcagcctcataaatgttgatccggtcaatgacgtccgcatggacaatgccgactcctacagcggccgcttcttccgtgatccggctgtaatactcctcgagcttcttttccgacaatttcttcgagtccgtgagaccgagaatctcgcattctgccggcaaaatgacggcgccggcgacaaccggtccggcaagcggccctcttccggcttcgtcaacacccgcaatcaggcggaagccctttttggatgacagtctttcgtatgccgtcatgttcagccattgctctttaagagctttttccttcgcgtgctttttcagccattgctctaaaagcgtctgtacgctttttctcgggtctttctcacattgggcaaggaaggggtcgctttcgtccctgacctcttgcaggcgttcttttacgctttttacggttaatgtattcacgttctcttctcccttacattatgtatatcggtattctgcggaaaaaataaagacccgcatcgctgcgcgtctttattctgatggtgtttcaaatgaaagcctgccgaatttttccgtccggatgtcccgaatgatgacttccgttgttttatcatagtcaaccattccgccgcccatcaaacagccgcgtttttcaccgatcgcgtcgaaaagagcggcgatatcctcagggatttcctgaagtccgtagcgctccttcaagcggtcgggataatgctcttccagaaagcgcagcccgaagacggccacatcctgcaggttgataatcgtatctttaatcgctccggtgatcgccaggcgcaagccgacaagctcatcttcaaatttaggccataaaattcccggtgtatcgagcagctctaattccttgcctacctttacccactgctgtgaagtggtaatgccgggcctgtctcccgtcttggcaatgtttttcttggccagccggttaatgagcgtagacttgccgacattcggaatgccgatgattaatgcgcggattgctcttggcctaatgccttttgctttcattttatcgaacttatctttcagcagctcttttgaggacggcacgatttgatgcagtccctgcccgttaacggagtttattgaaagagagggaatgccctgttcctgaaagtggtccttccactgggcagtcacagccgcatccgccttatcggctttatttaaaagcataatgcgcggcttattttttaaaatctcctcaatcatcggatttctcgatgacatcgggattctcgcatccaccaattcgtatacgatatcaattaatttcagtttttctgttacttcccgtctcgctttagccatatggcctgggaaccattgaatggtcatgtgacttcgacacctgccttatttgccggaaccggatgttccgatgatctcttatgtattttacgttgcttgttcagcttttacaaatttcatataaaaaaagagcctgttacgggtaacaagctcttttcgttcgttatcattatcgtctgatttctttaatacgagccgcttttccgcgaagttcacgcaggtagtaaagtttagcgcgacgtactttaccgtaacgtacaacttcgattttcgcgatttttggtgtgtgtacagggaatgtacgttcaacgccaacaccgtaagaaatcttacgaactgtgaacgtttcgctgattccaccaccacgacgcttgatcacaacaccttcgaagatctggatacgctcacggttaccctcaacaacttttacgtgtacacgtaaagtgtcaccaggacggaacgcaggaagatcagtgcgaagctgttcttttgtgatatcttgaattagtttttgcatcgttttcaactccttccaacagatgctcttggccacaactgcaaggcacagcggaacatcgttttcaagcttctgaaggataagcctccttaagccacaagtagtatcttatcatatcttcatcgcctgcgcaatagaatctattcgttttcccactcggaaatccattttctttgctcatcagtgagaggatagttttcaagaagatccggacgtcttaaaaaggttcttctgattgattctttattgcgccattcttgtatttttgcatggttgccggacagaagggtctcaggcacttttaagcctttataatctgcaggcctcgtatagtgcggatgctctaaaagccccgtgctgaaggaatcctccacgtgggatgcttctttcccgaggacgcccggcaaaagcctgacaacgctgtcagcgatcatcatggcagggagctctcccccagtcagcacaaaatccccgatggagatttcatcagtgacaagatgttcccggatccgttcatcatacccttcataatgtccgcaaataaacatgagatgttcctcttccgccagctcctcggctttcttctgcgtataacgctcaccttgcgggcagacgagaataatgcgcggcttggcgtccgtaccggctgtcagcttttcaaccgcatcaaatacaggctgcggctttaacaccatcccggctcccccgccgtacgggtaatcatcaaccgtttggtgtttattatccgaaaaagcccggaaattgatgacgtcaaaacggacagcctctttttcttgtgctttttgcagaatggatgagccgagcaccccttgaaacatttcgggaaacagtgttaaaaagtcgattttcattcgtctattaacccttccattacatgaatcttaattttcttctcatttatattaatatcctttaccacagaagcaatatacggaatgagcgcatcttttttgccttttcttgcaaccacccatacgtcattagccccgggcgtcaagatttccttcactgtgccgatcagttccccgtcttctgacacaacctcgcagccgatgatttcatgaaaataaaattcatcttcttcaagctctcccaagtcttcttcagggactttgatcaccatgtttcttaggtgctcgacttcattgagactcggcatttctttgaattgcagcaggtgaaactgcttgtgaagcctgtgggcgcttaccgttactttgattggctccgcagccccttccgcaaacaaataaagcgtattgccgggcttgtaccgttcttcggcaaagtccgttttagaaatgacccgcacttcgcctttaatgccgtgggtatttacaattttgcctacattaaaccatctgtttgtcatattatcacctcgggcggatttcaattactaccccgtcttttatgacgatggtatttgccgctgttttttcatgccagttatcaccgacgttgattgaaagcagcgcatcgatctccttttccttcacttcgcttccaagcgggagcgactctgtctggcttatttggaaatcgatcattttgattttgtcttgtcttttttcaatggcttttttaaaagattccgctacatcgggattctgctgatctttttcatgttttctaagctgaaaatagagctggctgcattctcgttcaagcgtttgctttttttctgcaaaagaggtcaaaagcttttccttgctttgctcggtcagaacctgcataacggttaccctgtgaataatctgcataggaccagactccccactcttccaacatatttctgttcatttgccttttttacgtgtaaaaaaaggggaggtgccggccctctccctttttcagtcaaatatttcaaattgaactttcttagaagactgtgcgccagctgcaaaaacgacggttcgaatcgctcttgcagtccggccttgctttccgataattttaccggtatctgacttattgacagataagcgcagcgcaatcttttgatcagtctcttcctttgtgaccgttatgtcttccggatggtcgacaagcggagccacaatgctgacaatcaaatcttccaagttctgatcagtcattacttgccttgtttagcgttgtggaatttttccataattccttggtttgagaacaagttgcggactgtatcagaaggtttagctcctgtttgaagccatttaagagcaagctcttcgttgattttcacttcagccggctttgcaaccgggttgtatgtgccgactgtttcgatgaaacggccgtcacgcggtgaacgagaatctgctacaacaatacgatagaaaggagatttttttgctcccatacgttttaaacgaatttttactgccattttactagcacctccgaaaatatttcaacaagatagtatattaacaatgataaaagtgtttgtaaagtgttttttcttaacaacggttttatcatgtataaccgattacataaaaggtaatttaaagccttttttcttcccttttgtcatgttggtcatctgcttcatcatttttttcatttcctcaaactgctttaaaagacggttgacttcctgaacggacgttccgcttcctttggcaatccgcttccgccggctggcgttaatgatatccggctgttctttttcaagaacagtcattgatttaatgatcgcttccacatgattcagctgtttttcatcgacttggatgttttttaagcctttcattttgcctgcgccgggcatcatttgcagcagttcgtcaagaggccccatgtttcggacctggccgagctgctccagaaaatcgtccaatgtgaagctcatcgttctcattttctgctcaagctctttggctttgtcttcatcaacggtcgcctgagctttttcaatcagcgtcagcacgtcacccattccgagaatccgggatgccatccgttcaggatggaacgcttcaagagcatcgagcttttctcccattccggcgaatttaatcggcgtttcggtgaccgcgcggatagaaagcgccgcacctccgcgggtatccccgtcaagctttgttaaaatgacacccgttaaaccgagctggtcattaaagcttttggcgacgtttaccgcatcctgaccggtcattgagtcgacgacaaggaaaatttcctcaggatttgcgacttcctttacgccggagagctcatccatcagttcatgatcgatgtgcagccgtccggcggtatctaaaatcacataatcatgatgctcttccttcgctttttcaatcgcctgtctggcaatttccaccgggctgacctgatcgccaagcgaaaagaccggcatatcaagctgttttcccagtgtttccagctgtttaatcgcggcggggcggtaaatatccgcagccacgagcagcggtttgcggttatgttttttgcgcagcaggttggcaagcttccccgtggttgtcgttttaccggcaccttggagcccgaccatcataataacggtcggggggcgtttggcgacggcaattttgctttcttcgccgcccatcagctcggtaagctcttcttttacgactttaataacctgctgaccgggtgtcagactctgcataacgtcctgtccgacagcccgttcacttacttttttcacaaaatcctttacgactttaaagttaacgtcagcctcaagaagcgcaagacgaacttcacgcatcatctcttttacgtcttgttcgctgacttttccttttccgcggatttttgaaatcgtcttttgcagtcggtcggctaatccttcaaatgccattgtttgccgcctcctaatctaatttctcaagcgcttcaatcagagccgtcattttttcctcttcctgcaacccggaagcaagctctttcagctttgtaaacatttctttacgctcctgaaactttttaaaaaggagcagtttttcttcatattgttcaagcatcgcttcagtccgtttgatgttatcgtaaacggcttgccttgaaacgtcatactcttcggctatttcaccaagggagaaatcgtccagataataaagcgacatatagctcttttgttttgacgtcagcaacgactgatagaagtcaaataaatagttcattctcgtcgttttttcgagcgacatttgagctctcccctttgttaagtcaaatccctttacaaaaacttagtttacatggtttcagagcgtgtgtcaagtttttatcttgtcaaagcatgatgctctttttacattataagtttttttaaaaaaattcatatagaccgtcgttaaaatactcgaattcttgttttgatacacgatagcggcaatagccttcgtaaaaagcattaaggcatgcttcatttgtgacaaaatgactgatcgctaatgattcatcatatcgcggatctcccgccgatattcccgcagcatcgataaacagatagacctctccgtctttcaccagcacattatcagtcgtgcagtcaccgtgaatcattgtctgctgaacaggaacaggcctgcacctgtccaattccttcaaaagctctgcacttccttcagcctgtccttttttggcatattccccggctcgtttgatttgcagatcgagccagtccgtttccggctgtaaaccagagaccatttcggtttcatgcagccgttgcagaaactggccgaaacttttgatcagctttttcttttcagtatccccttttgcttttcttaaagccgaagtcagggtgattccatcctcaaatgacattagaatatggctggcatgctgttcctgtatcatcccataataaacaggaacaggcagacgacgagtttccgtcagtttttgtaaaacgaaggcttctctcattaaccattcccgatacttctgttgaaaagaacttttcagcagaaatgcgtcttggccggtcactatttttcgaacggttgaagtgtctccctgttcatccaacagcgacatatggtttatcgcgccgatcttactttccaattcagctttcagccatttgtccaacaattgccccctccattccgatctatcaatgtgtataaaaaaacgagtataaaaccgtccattttatactcgttttttattcattaatcctcggctttttcaactaaatcagaaaagagaccgtatacgtaagattctgcatcaaaccgctggagatcgtcaaccttttctccgaggccgaccagtttcacggggatgtgaagctcattgcggatcgccaggacgataccgccttttgcggtgccgtcaagcttcgttaacgcgatacccgtcacattcgtcgctttggagaattctttcgcctgcgccatcgcattttggcctgtcgtcgcgtccagcgcaaggagaacctcatgcggagcctcaggcacttcgcgttcgatgacgcgtttgactttttcaagctctttcattaagtttactttattctgaaggcggccggccgtatcacaaatcagcacatccgctcctcttgctttagccgcgtgtacggcatcataaataaccgcagcagggtcgcttccggcagcctgtttaatgacaggcacgcctgtacgctccccccacacttcaagctgttcaatcgccccggctctgaaggtgtctccggcagcgagcacaacggatttgccttcattcttcagcttatgggcaagttttccgatcgttgtcgtttttccgacgccgtttaccccgacaagcagaataacgttcaggcgcccgtcctgaatatttaattcagaaatctgttcgtcgccgctattataaatgtcgacaagcttttcagaaatgacggactgcacttcctgaggatcctggatgtttttcagcttcacttcttttttgagctcatcaatcagctccataacggttgtaaaaccaacgtcagcaccaatcagcacttcctcaagctcctcgaagaaatcctcgtcgactttccggtagcgggagacgagttcgttcactttatttgagaaggaatttcttgttttttcaagaccatctttaaatttttcagagacggagtctgtctgtttcgtgattttctcttttaattttttaaaaaagctcatctttcaacctctttcctcgttactgaacgaattcttttgtttcttccagtttgaccgaaaccattcgggaaacgccggattcctgcattgtaacaccgtagaggacatccgcttcttccatagtgccttttctgtgggtgatgacgataaactggctgtcgccgctgtatttttttaaatattgcgcaaacctgaatacattggcttcatcaagcgcagcttccacttcatcaaggacgcagaacggcacgggccttactttcagaatggagaataaaagggcaatggcagtcagcgcccgttctccccctgacaaaagatttaagttttgcagttttttgcccggaggctgcgcgataatgtccaccccggaattaagaagatcattcggatcagtcagcttcagttcagcccgtcctcctccgaataaagaacggaacacgtcgttgaattgagaacggatctggacaaacgtttcatggaatcgcttcgtcatttcagaatccatttcttcaatgacttgaaacagtgtgtttttcgcttccgtcaggtcatttttctgctctgttaaaaactgataccgttcgtttactctttcaaattcatcgatgctgccgagattgaccgttccgagctcttcaattgaaagcttgatcagtttgacccgttttctcgcctcttcaggctcgagttcgagccgatattgttcttttgccccttcaaaggataagctgtactcctcgcgtaaatactgcaagagattatcaagctcgacttccatccggccgagttttacctcttcatctttcagaatgtccgttttttgcttgtacagacgcttcatctctttcagctcaagctcgttcgtatcaagcgccctctgaagcttcacacgctggtcgcgccggctggcgatcaattcgatcgttctcgttttatcgtgaagcttgtgatgggctgcttcttcaagctgctcctcaccgcttgtgctggacgtcatctctgaggtcaggaggcttaaatcttcccgtgtttctttcagagcgagctgcgtttcttcaagctcttttttcagtcttttgaggttgtcttcctcactcgagcacgcctgttcttttttcgcagcggccactttacattccgtcagttcatgagagagcgtttctttcgttgaggatagggtctgcttttgttttgtcagcctttccatctcttcctcaagctctttcagctggccggatgcctcactcagctgttcttccagagctgatttgcgcgtctctttttcccggctgctttccgtcagcgatgctttctcctgatcgtaaagctccagatgggtattgatgttcttttcagcgacttcgagttcatatagcctgccttttacatcctgctgctttgttctgaaagcttcaccgtcttcacggagacagctcagcgtatgttcaagctcttgaatggcctgcttcagcgttttgacctctttttcaagcagagctgttttttcttccatttcggcaagccgcgcagtcaccgtctcaagctcacggcttctgccgagcagagaattgtttttctttttgaccgcgccgcctgtcattgatccgcctggattgacgacatcaccctcaagcgtcacgatgcggtagcggtgcccgagaagcttggccagttcatttgcgccttttaaatcttcagtgatcagcacggtgccgagaaggttttgaatgacattccgatacgcggcatcatatgtgacaagcccgctcgctgtgccgaggaaagacggatgctttgaagccgtctgttcatcacgggtttggagctggcgcggtttcataaccgtaagcggcaggaacgtcgcgcggccgaatgaattctgttttaaatattgaatcgctttccgcgccgcctgctcgtcgtctgtgacaacgtgctgcgccgctgcgccgagtgcaatctcgatcgccgtttcatatttttgttcggtggcaatcagttcgagaacggcgccgcggatgccgccaagctgctctttctgcttcagcacttcttttacgccttggtaaaatcctgaaaaatcgccttgcatcgtttcaagcatatcttttttggatctggcctgctggacgaattgatacgcctgatacagcgcagattctttcttttcatattggcgttttttctgttcatatgctgtctggacttcgcgaaagcggacgacctgattgtgaatatcctcttcaacggcggccaattcttcttcgcacgccgctttgcggactgcaatatcgttacgttcttcaaggtatttttcattgtttgcggtcagtctcgcctgctggaccgcagattgggacatctggtcatctaaaagctgcagctcgttgcgaatcgacgcctggctgtttaacaattcaaagtaatcgctttttaattgttcaattttgtcttctacattttcattatgcagactgagagcctgctgcttttctttcacctgggcgtttaactgcttcacttccgcacgcagcttatcatagacggcagactgtttttcaatgtccgctttcagttcggcttctttgttcgtgtaatgtgtaacggattcctcaagctgttcccggttttgcgcggcgttttttttgcgctctttcagcacttctttccggccttccagcttttccagctcttcacttgtcacgagcagaacctgctgcagttcgttgacggattcatcaagcgcgtggattttatctctcgtctcttctatcatcgcttcttttgcggatagagccgatgattccgccaattcttcttctttagccgcctgcaccttttcttttaaacccgaccatctgccatgcagttgttcgatgtcaaaggcggtaagggcgatttcgacatgctcaagctctttctttttttctaagtagtctttggcgattgatgcctggattttcagcggttcgacctgatcttcaagctcgtggagaatatcttccaccctgtttaagttatcctgcgtctcaaacagtttgttttccgcttttttctttcttgttttatatttcagcacgccggccgcttcttcaaaaatactgcggcggtcttccgctttgctgctgagaatctcttcgactttcccctggctgataatagagaatgcttcttttccgagcccggagtccataaataagtcaatgatgtctttcaggcggcactgctgattgttgatgagaaattcactttctccggaacggtacacccgtctcgtcacgctgacttcgtggtaatcgatcgggagaaaatgatcttcattatcaagcgttaacgtgacttcggcaaggttcagccgcttgcgcgaatcacttcccgcaaaaatgatatcttccatttttccgccccgaagcgagcgggctgattgttcgccgagcacccagcggatggcttcggtaatgttgctctttccgctgccgttcggaccgacaacggccgtgacgccttttacaaagtcaacggatatccgttctgcaaatgatttaaatcctataacgtctaaacgtttgaggaacatcccagatcctccttatcgtataagtatctcaatattatcataatcacccgcttatatcaggcgcagacatactgaaatccccctagggaaacagggggattttattgtttcgtatgatgtttttgcatttttgcaagagcttcctgtgccgcatgctgctcggcttcttttttggaacgtccgttcccgataccgagcgcctcacctttaagagagacaagcgcctcgaattcccggttgtgggcaggccctttttcattgagaattttgtactcaagcgatccttttccatcccgctgtacaaattcttgaagctggcttttgaaatccatcacatgagaaaaagcaccatcgtttattttagggaacacgtacactttcaggaattgctgaaccgggtcaaggccctgatccagatacagtgcgccgataaacgcttcaaacacatccgctaaaagcgcaggacgctttctgccgcccgtcatttcttctccttttcccaagagaacaagatcgccgaatgacaattcatgggcaagtgagacgagtgacggctcgcatacgatagcggctctcagcttcgtcaaatctccttcactcatggccggatatttggcaaataagaattgggagatcgtcagttccaaaacagcgtcacctaaaaattcaagcctttcattgtcttcatacggctttttccgatgctcattcacataagatgaatgtgtaaatgcttgatacaaaagtttctcgttttgaaaatgaaccgaaatccgttcttggaactctttaaattgctctatttttttatagaacttttttttatctttaaaatgtgagtgttttgacatagtaacctccataggcacatcaggttcaccgcgctccccgccgtaaacggaatcggcagcgcgtacagcgtcagacgccggtaaccgaacgattaaagggctaaagccccgctgtcaggcgggacttttagcatcagcttattgctggttttgtatgtagttcacagcgtcgccgactgttgcaatcttttcagcatcttcgtcagaaatctccatatcaaactcgtcttcaagttccataacaagctcaactacatctagggaatcagcacctaagtcttccttgaaagaagcttcaagtttgacgtcagcttcatcaacgccaaggcggtctacgatgattttcgttacacgctctaatgtatctgccatagcaattcacctcccctcaagtattatagaggattcgtttttaaaaaactagagaaactaggatgaaattttaaaaacaaatctttacatcaccattccgccgtcaatatgaagggtttggcccgtcatataacgcgatccttcagacgcaaggaacgtaacaacgctgctgatatcggaaggatcaccgaaacgcgcgagcggaatctgcttcagcatttcatcttggacttctttagaaagcttgtccgtcatatctgtagaaataaagcccggagcaatggcattgaccgtaatatttcggctcgcaagctctttggctgatgacttcgttaagccgattacaccggcttttgccgccacatagttcgcctgcccagggtttccgctgacgccgacgattgatgatacgttgataatccggccggagcgctgtttcatcatctgtcttgtcacggctttcgtgcagttgaatacacctttcaggttaatgttaatgacatcatcccattcattttctttcattctcatcagaagattgtcttttgtgatccccgcattgttcacgagaatgtcgattgaagaaaatgcagcgacagcctctttcatcatgttttgtacttcttcggaatttgatacatcggcttttaccgcgatcgcgtttcggcccaaagatttgatttcatctacgacttcgttcgctttcgcttcattcccggagtagttgactactacgttacagccgtttttcgcaagatcaagcgcgatcgcccgcccgattccgcgggacgctcccgttaccactgctgttttttcattaagcatcctgattctcctccttcagcgtttgaatcgccagttcgatggtttcatggtcagaaaccgagattgttttaaggcggcggttcacttttttcacaaggcctgaaagcacttttccgggcccgatttcaacaaacgtcgtgacgccttcgtcaatcagtttgttaatggtttcttcaaagcgtacaggtgagtacagctgttcgatcaattttttcttgatatcgtctttttctgtcataacgtcagccgaaacgtttgaaatcacgggaacagccgcattttttaactcacaggcgctgagcacctcctcgagtttttgcgctgccggcttcattaattcagaatggaacggtccgcttacttctaatgggattgcccgtttggctccgttgtttttcgcttcttctgaagccagctccacgccttttgccgttccggaaattacgatctggccggggcagttcaggtttgcaagctgtacgagatgaccgttttccgtcacttgatccgtcacctttttcaaggactccgcatccattccgagaatagctgccatggcgccttctccggccggcacggcttcattcataaattctccccgttttcttaccgtgtaaacggcatctttaaatgtcatcgctcccgccgcaacaagcgccgaatattctccgaggctgtggccggcggtgaaatcaggggtgatgccggattctttaaacttttccaatacggcgatgctcgttgtcaacagcgcgggctgcgcattgtatgtaagggtcaattcttcggcgtcaccttcaaaaatgagtgagctcagctttgtttcaagcgtttcatccgcttcatcaaaaatacgttttgacgcttcttcgcgttcgtacaggtcttttcccataccgatatattgtgatccctgtccgggaaataaaaatgcaatcttactcatgatgcggtaacctccagactactcatctgttttttcttcttttacttcttcttctataaatgcggccacgttttggctgaccatttctctcgcctggcgcagcgcatggtaaacagcgcgtgcgtcagaagagccgtgcgctttaacgacgggcgctttcaaaccgaaaagactcgccccgccgtactcagaatagtccattttcaatttcatttccatcagcttcggcttcagcactcccgctgcgagcttagaaacaaaacttgaagtcagtgtatctttcagcattttgaaaatcgataacgctgaaccttccaatgttttcaacgtgacgttgcccgtaaagccgtctgtgacgatgacgtcagcagcgccttcgagcaagtctctcgcctctacgtttccgacaaaattcacgtttgtttcttttaataattcaaacgtcttttttgtcaggtcgtttcccttcttttcttccgtgccgacatttaacaagccgacgcggggcgagctgattccgagaacctgccgggcatatacagatcccataattccgtactggacaagatgctccggtttggcatcgacattggctcccacgtccaaaagaaggaaaccgtcgcctgaaacagtcggaagcgtcggcgcaagcgcaggccggtcgattcctttaattctgccgacgataaacagtcccgctgtcataagtgcgcctgtattccccgctgagatgcaggcgtccgctctgttttcagccacttcctgcgccatcagcaccatagaagagtttttctttctgcgtacggcgcggaccggttcatccgtcggttcaatcacttcatcggcgtgcaacacagtgatgcggtctgatgttgttggcaagtgtgattctatcgttgtcttgtcaccgaccagcgtaatatggagatcgtcaaatgcctcaatactcttcattactccgtcaataacagctttgggtgcgttgtcgcctcccattgcatctacagctattctcatgcatgctccacctttatgattgttttgaacggtacatgtcaaagttaccggagaacacgacttcttctcccacatagctgttgacttcaactaccgttctgcctttttctttttcgactgccgtcactttggctttcgcaacgacgcgctcgccttctttcacctgtcttgtaaagcggatatttgcgcttgcggtcagcgccagctcatcatcaatgacggctacggcgagtgagttcgcctgcgcaaacaaatgatgcccccgcgcaatttgattgcggctgaagacatgttcgcgtcttacttctaatatggaaatggcctggccgtcaagctccagatcaataatttcaccgatcacttcgtctaaagacagtgatttcacttcatcatcaagcgtttgttctgccacgtttttaattctttccctcagctccggtattgagagctctaagcggtctaaacggatcgtctgaatgctgacgccgaatttccccgctaattcttcatctgtgatgaagggtgtcgatttgatcgtctgctgcaataatttttggcgttcttttttgcttcttctcatctgtaaacaccatccggacaattaagactaggtactaatagtagtatataatctcatagattggaatgcaatgattgttttttgaaagccgccgaattttacagaatcagcttaatttctccccttccaggacgccgcttgaaagtaattgaccgcgcagcatgcggtattcgtcatctttccaaaaagcctctgaagacaccagattggccgcatcctggcgggccgtctccaaagctctgtagtcatgaaccatatccgccaccttgaactcgggcataccgctctgtttttttccgaagaaatccccggggccgcgcagttcaaggtccttttcagacagctcgaagccgtcgtttgtctccgacatgattctcatccgttccttcccggtttcggatttcggatctgccatcaagatgcagaaagattggtggtctccccgcccgacccggccgcggagctggtggagctgagataatccgaaacggtcggcgtcatagatgaccataatcgtcgcattcggcacgttcaccccgacttctacgacggttgttgacacaagtacctgacattgattggcgctgaattctctcatcacctgatctttttcatcagaatggagcttcccgtgcatcaggccgacattccatttcccgcggtaaacgtcagaaagcatgttatatacgtcaatcgcattctgtacatccagtttatccgactcttcaatgagcgggcagataatataggcttgccttccctgtttcagctctttttctataaaagccaaaatccgctccagcatgtcgtgtttcacccaatacgtttcgatttgttttcgccccgcgggcatttcatctatcacggaaacatccatttctccgaagacggtaatggccaacgttctcggaatcggggtggctgtcataaacagcacatccggatcctggcctttattcttgagttttttgcgctgttcgactccgaacctgtgctgctcgtccgtaatgacaaggctcagcgctttaaattccacttcgtcctggattaaagcatgggtccctactaaaatatcaatctctccgagagcaagccgctccaaaagctccctgcgccgctttccttttacagaactcgtcaaaagcgcgatattcacatcttcatttgcaaacaacgatacgagagaatctgcatgctgttcggccagaatttcagtcggcaccattaatgccccctgataccccgacagaatcgcagcgtacaaagcgatggcggcgacggccgttttccctgaaccgacatcaccttgcagcagacggttcattcggtaaggggatgtcatatcagcggtaatttcccgaagcacgcgcgtctgtgcggttgtgagcgaaaacggcaggctgtctgtgaaagcggcgagcttttcagcaggaaacacatggctgatgccttttgactgttccctttccgctttacggaacgcctgcattttcagctgaaataataagaattcctcgtaaacaaaccggcgtcttgcctgctgtaacgattccctcgtttcaggctgatgcatcgtctgcagggcatgtttgtaatcaggcagcttgtagcggattctcaatttttcaggaagcggatcggccgcactgtccaaatgatgctccagcgcttccttaataaaccgtctcatcatttttacggtgacgttttctttaactgaataaacaggctcaatgcttttatcttcttgatgaggaccgttttttaattcctgcacggaaacggtctgtctgtgtttatcccatttcccggatatcgtgacgacagaacctaacgtcagtttcttttttaagtagggacggttaaagcagaccgcggtaattaaataattgccgacaagcaccctgaatgtcagcctgtttcgttttttgccgtaataggtaagagaaggttctgaatgaaccttcccttctaccgtcactctttcttcatgttttacttcttctaagtccctcagctcatagtcgtcataacggtaagggaaataattcagaagatcagaaatgtcatagataccaagttcgcgcaatgttttttctgtttccggcccaatgcccttaatttccgctatactagtttgctgatggtgtgtcacttgatttcagcgctcctccgaaaatttttttctccaactctcttcccgtcggtgtcgcggctaaaccgccttgtcccgtttcacgcagtgctgtcggcattgtctggccgattttgtacatcgcgtcaatcacctcatcgcaaggaatgcggcttgtaatcccggccagcgccatatccgccgcaatcattgcgttggatgctcccattgcgtttcgtttgacacacggcacttctaccaatccggcgaccgggtcacatacgagaccgagcatatttttcagtgtaatcgccattgcttccgctgattgctgaggcgttccgcccgccatttccacaatcgcagccgctgccatgcctgatgctgacccgacttccgcctgacagcctcctgccgctcctgaaatactcgcattatttgctacgacaaaaccgaacgcgccggctgtaaacagaaaacggatcatttgttctgtcgtagggttcagcttatgctttacggcgaataacgttcccggcacaaccccggcagagccggcggtcggtgtagcgcagatcgttcccatcgccgcattgacttcatttgtcgcgacagctttagaaacggcgtctaaaatcagattgcccgacaggcttcttcccgattggatgtatgcctgaagtttcacggcatctccgcctgttaaaccggtctgacttgtgacgcccttcagccctttttcaacagctgcttccatgacggagagattgcgctccattccttgaaagatttcttcccgcgttttttgcgttacttccatctcttgggtgatcatcacttccgaaatcggaatttgtttttcttgagtgatttctattaattcttttacattacgaaacatgtcattttcctcctgactttttagtcagctatcttagtaacctgtataatattaggaagtgttgaaagctcgtcaagcacttcttcttcaatattctgatcgacctcaatcgtcatcagcgcaagctggccgacgtccttacgcgccacttccatatgtccgacgttgatggagaatttcgcaagcacattcgcaacgcctgcaatcgtgccgaatttatcattgtgaacgactaaaatagccggatggtttcctgaaagacgcagctcaaagccgttgagctccgtgatttctatttttccgccgccgatggaaataccggtaagggcaagctctccctcatcatcagaaatgacgatacgcgccgtattcggatgaacgggcacggcatcctctgtacggaactctacatatatgcccttctcttccgcaatttgaatcgctgttttaatccgttcatcaaatgtatcaaaatcaagcaggccgccgataatcgcgacatcagtgccgtgacccttatacgtctccgcaaatgatccgtaaaaagacacaatgatccggcggggctcccgcctgaataggcttctggccactctgccgatccgggcggcgcctgcggtatgtgaactggacggaccgatcattaccgggccgataatatcaaaaacgcttctatacttcatgctggtttgttcctccttaacatcactctattcagcgcttttctttagactaattgaacatttctcaattggcaagcaggcacactgccgcactgccgcaggtaaataaaggcataagaatagaagggcctgataagcccttctactctgccgcaaatatatatggatacagaggctgtctgccgttatggatttcaacctcgatatcttcacagacgcttgcaatatactcagcaagtttctcagcttcttcttccggcgcgtcctctccgtacaggatggtgacgatttcatcttcttccccgatcatttcatccagcagcaatttcgccgcactcatccgatcttcggcgctgccgataattgaactgtttaaaatgccgataaaatcaccttttttaatatctttgccgtcaatatgggtgtctctgactgaatatgtcacctgtccgcttttcacattccggatggcctcaagcatattggcttcatttacatcagccggctggtcagggttaaacgcaagcagggcggtcatgccttgagggaccgtttttgccggaatgacaatgacattttcttcagccacgctcgccgcctgattggcagccatcacaatattggaattgttcggaagaatgaaaaccgtctccgcattgacagactgaacggcttcaacaatatcttccgtgctcggattcattgtctggccgccttcgattacgtgtgaagcgccgatgctcgtaaacaattcagaaatgccctctcccattgccacagtcacgatgccaaaaggcttgcgggcttctttcataacgccggccggctttttttcatcatgttcttggctgatgattgaagtatgctgttccctcatgttttcaattttaattttaatcaaatcgccgtaacgctgtgcgagattgagtacgttccctggttcttcggcatgaatatggactttcgccagcgtatcatcagccacgaccagcaatgaatcgccgaaacggctcagttcgtttctgaacgtctcttccttgaacgtccgtttatcttgatccagccttaccatcacttccgtacaaaatccgaattcaatatcttctgtactcagcatgctctgcgcgcttttatgatgctcggcattcaccatatcatcgagtgccggaagaaccgcttttttcggtacggcctctccttttaaagcagacaaaaagccttcatatacacaaagcagaccttttccgccgctgtcaacgacaccgacgtcctttaaaacaggaagcagatccggcgtacggttcagcgacgcttccgcttcttcaataacggcctccatgagagcaatgatatcggtttcttctttggccgaggcgaccgcttttttagccgcatccttggccacggttaaaatcgttccttcaaccggtttcatgaccgccttatatgccatatccactcccgcttggagtgctgcggcaaattcttgggcgtctatttgatttttgttttcaatgctctttgtgaaacctctgaacaattgggacaagatcacccctgagtttcctctcgcccccataagcaggccttttgacagggcgatgccgactttgccgatgtcgggtgagtcaatgtgctctacctctcttgcaccggatgacatcgataaattcatatttgttccggtatcgccgtcaggcacgggaaacacgttcagcgcatccaccgcggatgcgttttgagacaatgtctcagctcccgccagaatcattgccgcaaaagctctcccatctaagtttcgtctagacaatactcatcctcctcactacgggttcgttactcgtacgccttggacataaatatttacagaatcaactgcaagtccgattgtttgatttactgtgtattttaccttcgtctgaacattgtgggctacttcggatattttagtgccgtagctgacaataatgtacatgtcgatatgtatttgttcggcttcctgacggacatgtacgccttttgcgaagttctctctccggaggatttcagacaaaccgtctttaatctggttttttgaggccatccccactattccgtaacagtcaatggcagcgcctccggcaaccattgcgatgacttcgttggatatatcaatctgtccgtattttgtcttcatttcaatggacacacaggttcctccttcaggtgcatagagttatcattattctactatatgtatcccattatgaaaagaaaagatacagacagcggccttcagcgcggaaatgtgattggttttacatgtcaagtgatttttcttgaaagtaagggaaacaatagttgcaaacggtttttagctgtggtaaattatttaaagtattgtataacgaaagcatctgagaaactatgtttgaaaagatgtttcgcgcagttaggagggaaacaaatggcacgtaaatgttttattacaggtaaaaaaacaaaagccggaaacaaccgttctcacgcaatgaacgcttctaagcgtacttggggcgccaaccttcaaaaggtccgcatcctcgttgacggcaaacctaaaaaagtgtatgtatctgcccgggctttaaaatccggtaaagttgagcgtgtataagcaaaaatgaacgcctgcccttttatgcggcaggcgttttttatgcgttcaaagagggcaatttcagcttcttgggcttactcttttctaaatgagcccagcatcgcccggacaattcctcctaaaaacttcggcaatttaatggtataaaatttcattttgtcccctcctataagtcccgtatccgctgcgttcatcactttaggattcatggttttttccgcatatggcagaagccgcttttctaatccgcgctccttaccattattaatatgccttttgcaaacgaaaaagtacctcgtgaatgaatgagttcgttactaatacatagtgtggaacccagaggaatatgacaattatcaaggggatatttaaaaccgtcgagcgtcaggccgtctgccgcttccgtaaacggaatgaaagaaatatagcgtctgcttgctttttcttcaattgtataacggccgggcccgaacatctgaatgtcattctgccggtcgatcagctcgacatcggtattcttatgtaaagctttatacagcagctggatgttccctaaaaagtgatcggctcttccgcccgtcacaccgaatatccgaatggtttccggttctagttgtaaagcccagtcaagggcgagttcaagatcggtataatctttttccgcctgatatacatggagggccggcgccgctttttgaatctgcatgagctcctcttccgtaatgctgtcaaaatcaccgaaagcttcctgcggaatgattccggcctccaaaagagcaaccgtccctttatcgactccgacccacgtcgtatctccgcctgtgtattcggatagatcgggaataagctcccgcgggccgcccgcaacaatattgattgtcttcatatgttttcctctctcttagacgcgaaaagagccggcggctttcaccgggctctttttcagcatgtttattacgcgtttcgaatgtcagcgatggcttttttccgatccggctgattatatacggcagacccggcaacaagcagattggcgcccgcttcagcgcataaaggggctgtttctttattaacgcctccgtccacctcgattaaaagctcagacaggcctttctcctcagccagctgtttgacctgacggattttcggcagaaccgaatgaatgaagcgctgtccgccaaaaccggggttaaccgtcattaacagcacaaggtcaagctcctcgatcacatgttcaatcatttggacgggcgtatgcggattgagcacaactcccgcttttaccccctgctcttttatcaattgaatggtccggtgaagatgcggacacgcttcagcatgaacggaaaggatgtccgcaccggcttttgcgaatgccgggatgtagcggtccgggttttcaatcataagatggacatccagcggcagatcagtcaccggacggacggcttcaacgataagcggcccgattgtaatgttagggacgaaatggccatccatgacatcaatatggatatagtccgcccctcctttttccacgtctttaatttcctcgcccagtgaagcaaaatcggcggaaagaattgatggcgcaaccttaatcatattaatacctcggctttctctcttttatttcctgcataaattctttgtaatgctcatagcggtacggctgaatctctccttcttccaccgcttgctttaccgcgcatttcggctccttaagatgcagacagcctctgaatttgcaagaggcgcttatttctctgatctcagggaacgtgctgcccagctcttcttcctcaatgccggtaaattcaagcgaactgaaccccggagtatccgccaccagaccgcctgatgtatgaatgagctccacatggcgcgtcgtatgttttccgcgtcccaaatgcgcggaaatctcgtttgttttcagctcaagctccgggctgatcgcatttaaaagcgaagattttccgactccggactgaccggcaaacaccgttgttttgttctcgaagtgtttcacaatgcctgttaaaccgctgttttcttttgatgacgtcacatatacgtcataaccgaccgcctgatagtctttcacgtaagaaagtatcgcctctttcgattccccgtctgcagctaagtccattttggttatgcagatgatcgggtgaatgccgttggcttccacaaggacgagaaaacggtccaataaagacgtgctgaacgccggctgaacggcagaaaagacaagaacggcctgatcgacatttgaaatcggcggcctgatcagctcgtttgttcgttctttgatttccagcaggtagccttctttatcattttcagcctgataaacggcataatcgccgaccaggggcgttattttattttttctgaaaatgccccggcccctgcattgaatgatcttgtcctgtgattcatccaagacataatagaatccgcttaacgcttttataattttgccctcaggcatagggtacctccttgtcagtcattatctttcgggtattcaatcgttttgtagctgacgactttatgatcgaccatcacttgataataccccttctgtccttgatcaatcttcagttcaattgttttttcagtcggctcttttattttaaatgagtcatacgtatcagagatgctgtggttcttatcatcgatggcgatttgcacttcaagctcgtccccttcatgttcgggttcgtaaggaatgctgattttttcttttaccgttttcgccggtttttcttcaggtccgagcgagaacgtcacttcaacattacttcccggcttaaccgcagtgccggctgccggctcttgcttcatgacttgtccttccggcacgtcatctgaatgggcttgtttttcaacaagctgcaggccgttatcttcaagataccctgaagccgcttctttgctgtaagtctttaagtccctcagcgtaacgtccgccgggccgaggctgaccgttagattgacttcatcgtcgcttgcgaccatgtcggtgccggctgacgggttctgatcaattacggttccggcctcgctgtcatcgttctcttctttgacattgacatgtttgaagcctttttccttcagcgctttttttgcgtcgccgatctgccgtcctttcacgtcgatcagctgggttttcggttttccgatgcttttgtacagttttacagaagagccttctttaacggtagaccccgcttttgggtccgttttgaccattaattcctcttctattttttcatcttcaatgtccgttatatcaggatccgcccggagtccgttcttttcaagcagggcttccgctttttcgtacttcatgccccgtacgtcggggacgcttacatctttaggcataaataaagacgggaacacggtgaccgcaagaacagccgccataatgaaaatgaaacagacggccagcaaaatccacggccatttccgttttttctttttggcgggctgctgttccttatcgtccgtctcccccgccgtttccgcctgaggcgcggcttttgcgccgtcagtaataacgggaatggcttttgtcatttcctcatcatcctgcacggaaaatttttgttcattcagcctgccggcgtcaaaagccgttctgatgtccgcttccatgtcctcggcgctttcatagcggtgaaacgggtctttagcggttgcctttaaaataatgttttcaacgctctgcggaatggaggggttccactttctggcggaaggcgtttctgtttgcagatgctttagcgctatgctgacggctgattctccgtcaaaaggaattttacctgttaaaagctcaaacagcacgatgccgagcgcgtaaatatctgattttttcgttgccagaccgcctctcgcctgctccggagacaaataatgaaccgagcccagcacagaattcgtatgtgtgattgtcgtagacgtaagcgctgtggcgatgccgaaatccgtcaccttgatatgccctaaatgatctatcaatatattgtgcggtttaatatcccggtgcacgatatggttttgatgggcatgggcgatggccgagacgatctgctccataatggacaacgcttctttcggatggagcggcccgtgtgcgtttatgtattcctttaatgtcatgccttccacatattccatgacaatgtaataaatatcgccttcctccccgatatcgtaaatactgacgatattcggatgatcgaggcttgatgccgactgtgcttctcttctgaaacgcctgataaaatcaatgtcattcacaaagtcaaatcgcagaattttaattgcgacttcacgttcgagaatgatgtcctcagctaaaaaaacgtttgccattccgccgccgccaatgggccggaggatatgataacgcccgctgatccgcttgccggttagcacttgtcttcaccctcttttgcatctgcggaaaactcaatcaacacagccgtgatgttatcttcgccgccgttttgattcgctttgctgatgagaaggtctactttttcctgaggatcagattgggcttgaagcatttgtttgatctcgtgatcttctattttatttgacagtccgtcagagcataaaagcagctgatcgccgtcagacagttcaaaagaacgggcgtcgggactgatggtttcatctgtccccagcgctctcgtcaatacatttttccgcggatggtgctcggcgtcctctttcgaaatttcccccgtcttgaccagctcattcacaagcgaatggtcctcagtcagctgagtgaattccccctcttgaagcaggtagcaccggctgtctccgatatgagccacagtgacaaacttcccggtgaataaggcgcaaacaacggtggttcccattccccggcattcttcattcgctttagcgtggtcatgtactttgacattcgcctcatgaatccggtctttcagccaatcctcgcaagcagacggcagagaaggaaccgtttcggtccggttccactgctcttccatcgccgcaaccgccatcctgctcgctacatctccggcaagatgaccgcccatgccgtcggcgacaaccgcaagcaccgcgtcttcttttgtgaaaatgcccgccgcatcttcattatgccggcggactttacctgtatctgttttcaaggctgtaatcaacctcttcacctcgtctcgtcttgacgctccttcgcgcgaagctgaccgcaggccgcgtcaatgtcatggccttgctctcttctgatcgtgacatttacaccgcgggattttaacgttttttcaaatgcgaaaatctgatctctcggtgtgcggacgtaatcccgttcaggcacatagtttaccggaattaaattgacatggcatttcacgtcttttaacagttctgcaagctcttctgcatgttcgacctgatcatttacgccgccgaacagcccgtattcaaagctgatccgtctgcctgttttctcgatgtaatatttgacagcctccataaggtcaggaagcttataggctttgttaatcggcatcagacggcttctgatttccgtattcggagcatgcagagaaatcgcgaaattgatctgcattttttgatcggcgaaatcgtaaatcttcggaatgattccgctagtggaaactgtgatatgacgcgctccgatgttcagccctttatcgtggttaatgatttttaagaaagcgagcatttcattgaaattatcaaacggctctccgattcccatgatgacgactgagctgacgcgttcatccgtttcatcaagcgccttttgcactttcacgacttgagcgacgatttctcccgcttcaagattccgtttcagtccgccgagcgttgacgcgcaaaatgtgcagccgatccggcagccgacctgtgtcgttacacatacagaattaccatactcgtgtctcattaaaaccgtttcgatcgtataaccgtcatgaagctcaaataaaaatttcatcgtgccgtcttgagatgtctgttttacagccgttttcagcgttgtcagcacaaaattgctctcgagtttttcacgcaggctttttgagaggtttgtcatttcatcaaatgaagaaacccgcttttcatagagccattcaaaaatttgtgccgcgcggaacggcttttcgccattctcggtcagccattgtttgatttcatctaattcaaaagagtaaatggacggctgctcagtccgcagctctttccgtacgcttgtcttttttaattgtgtcattttttatcccttctttctcatgctgctaataaagaaaccgtctgttccgaaataatgcggaagaatttgaaggcttccatcctgaacaaagggtctcgccttttcaggcagccgcttttcaagagacaaatcgggttcaaactcagggtgttcttgtataaacgcatgcataacttcttcattttctgtccggtccattgtacacgtactgtatacgagtgtgccacctttttttactaatggggcgatttcccttaaaatgccgagctggatttctgacagccgtctgctgtcctccggcgtcttcgtatatttcatatcgggttttcttctgatgacgccgaaacctgagcaaggggcatcaacgagaatacggtcaaaccgttctgcgccaaaggcctctcccgcttttcgcgcatccatcgtttgtgcgtcgatgatcgtaagcccgagccgttctgcgccctctttaatcagcttcactttatggcggtgaagatcaagcgatgtgaggctcccctcgttctccatcagttccgcaatgtgagccgactttccgcccggtgcggcgcatgcgtctaaaacggtttcgcccggcttcgggtccagcgcccgcgcgacaagcattgagctttcatcctgtatggatacccggccgttttggaaaaatgccgtgttcgcgatgcttccttttaaaagcttaatcgcatcaggagaaaggtctccggcttccgcttccagaccggctttctccatctcattcagcaccgtttccctgtcgctctttatgtgattgacacgaagcgtctgcttcggcggaatgagatgaatccggcagatcttttcagccgcctcaaagccgtacgcctcgatccactcttttacgagccattcgggatggcttgtctctgcggaaagacggagaaccgggtcttcaatttcagcgaatgacggcgccccttcacgctgcagggagcggaggatgccgttgacaaaggacgcaatgcccttatgcccgcgttttttggcgatctcaaccgcttcatgaatggcggcgcgatccggtattttttctaaatactccatttgatacgcggacagacgaagcagctgaatcacccacggtttgaccttattcggcttgcggataaaaggcttcagcatatagtctaaggcgattttattttgcagcgttccgtagacaagctctgtcagcagtcctctgtcctgatcgctgagcgtgttcgttttgataaccgatgtaagaagcaggttgctgtatgcctgattttgctcaagcttctcaagcgcttcaagggcgagctcccggacattaattttcttcatttgcttctcctaacacgtcaccgggctgcacatttttgcctcttacgaaatcttcgcccttcatccgtttttttcccgccggctgtagctctgtgattaaaagggcggtgctgtttcctgctgcgacgacaatgccgttttgctccgtgcggatgactgttccgggcgcagcttcagtttttgccgcaactttttcagaagcccatactttaatattttgaccgttcaaagttgtataggcgacaggccaagggtttaaacctctgatctggttgtaaatctcttccccgggctttgcccaatcaatccgctcctgctcacgcttaatattaggcgcgtaagtcgcttttgattcgtcctgtttgatcggtttaatatttccggaaatgacgttcggaacggtctctgacaaaagctttgcccccgctatgcttaatttgtcgtgaagcgtgccgacgttatccgtttcatcaatttccacttcgattttagaaatcatatcgcccgcatcaagcttttcaaccatatacatgatcgtcacgccggttttcttcttcccttggagaatcgaataatgtatcggcgctccgcctcttaattcaggcaatagtgacgcgtgtacgttgatacagccgtatttcgggccgtccagcagctgcttgggcaggatctgtccgaatgccgccgtaacaatcaggtccggcttcaggctgagcactttttctatttcttcttcgagccttactttttcgggctgaagcacaggaatgccgtgacgttcagcttcagcctttacaggagggggcgtcatgattttttttctgcctttcgggcggtcaggctgcgtaacgacaccaactacttcatacccgtcttcaataagcgtgcgcaggacgggaactgaaaagtcgggcgttcccataaaaacgatccttgtcatccaatcatccttccatttctgccagttcttcttcagtgtagtaagccgtaatttttgatgtgaataaaatgccgtctaaatgatccatttcatgctgaacggctctggccaaaaaaccctccgcttctaaaataaacggttttcctttacggtcgtgggcttttacctttacgtaatccgggcgggtgacatcgccgtaaaccccgggaaagcttaagcagccctcgactcccgtctgttcaccgctcttttcaagaataaccggatttactaggtcgatccggccgctttcttcaccgatgtccacgacggccgctctttttaaaatgccgatttgcggcgcggcgaggccgacgccatccatttcaagcatcgtatcgtacatatcgtcaagcagtttttttaattttttatcaaacactgtcacttcatcggcaggtgtttccagaacctccgccgggtgtgtgacgatttttttcacagccaaaatttcgccctccaaaaactaatgttacatcagcatgtacggattcatatcgattgaaatcattacatgcttttgcgcaatgtcgcgtttatagtgctccagtatctttttcaactgaatctgcaactcgttttcctgtctgtattttatcacgcattgatagcgatatctatctttgatcctggcgatcggggaagccgccggcccgagaattttcgtatcaggcccgcatcccgctcttaaatagtttgtaatcttttctgcggtgaccgcggcttttggcgcttcttcatgagaaacagtcaccagcgccacgtaataataaggcgggtatgactgggcccgtctgtgcgccatttcctgctgaaaaaaagtttcatagtcgtgcgttttcgtcagctgaatgctgtaatgagacggtgtatacgtttgaatgaccaccgttcccggcttttcatgccgcccggcccgtccgcttacctgtgtcagcagctggaatgtcttctccgcggccctgaaatcagggatgtgaagcgtcgtatctgcgcttaatactccgacgagcgtcacgttcggaaaatcaagcccttttgcgatcatttgcgtaccgagcaggatatccgccttcccttcaccgaacgctgacaacagtttttcatgggcgccttttcttgaagtggtgtccacatccatcctgattacgcgcgcctgaggcagcactttggttagctcctcctccacacgctgcgttcccgtgccgaaaaagcggatatgttcgctgccgcattccgggcatgttcccggtacaggttcctcatggccgcagtaatggcatttcagcctttgtccgtagcggtgataagtcattgaaatgtcgcaatgcggacattgcggcacataaccgcagtcccggcacatcacaaacgaggaatacccccgtttattcagaaaaaggacggcctgctctttttttgcaagcttctcttccagctgttccatcagctctcttgaaaacattgatctgttgccgtttctcagttcttctctcatatcaacgagagaaacgtcaggcatgagctggcgatttacgcgatgttttaacggaagcagctcataaacgccttttttcgcccgcgcaaatgattccaatgtcggcgtggcgctcccgaggacgaccggacagctgtgatgctcggcccggcggatggctacgtcctttgcatgataccgcggcatttcctcctgcttataggaagattcgtgctcttcatcaataatgatcatgccgagattttcaaacggggcaaagatggccgatctggctccgacgacaagccggacttccttgcgctgaatcttccgccattcatcgtatttttcacctgtggataatccgctgtgcatgaccgcaacctgtgagccgaagcggcctttaaaacgattgaccatttgcggtgtcaacgagatttccggaacaagcacgatggcttcttgtccttttgccagcactttttcaatggattgcaggtaaatttccgtcttgccgcttcccgtgacgccgtgaagcagaaagacgtgatggacatggtcggctacagcttgtttaatcggctcaaaagcggcccgctgctcttctgtaagagagagcggctctgtttttttgaacattctgtcctgataaggatcgcggtaaacctcctcaaagctttccgtaagaagcccctttttaagaagcgttttcagcgtcgctgaactggaatcggtctttttgcaaagttcggccgcggaaatctttgctcccccgccgataaaataagtaagcacggcgagctgtttagaagcctgctttgtcaatgaatctgcgtgccgggcgagttcttctttgtctgcccccgcttcgatcatgcggatcatttttttattcgttttttgggcgactttatatgtgacatcaatgcttcctttgcgcacgaatttttgaagtgacgaaagaatgctttcatcggtaatatccgagtacagaagacttttttgattcctgaaaagctgtttgatctccggtgtcagcgcttcttcgtcaacgactttcagctctttctcgtacttcgccttcagtgcggcgggcagcattgcctgaagcgccgtgattttaaacgacagcgttttgtcagaaagccatgaagacagctgcatcagttcctcagtcagaacgggcgtcaaatcaagaagcttctcgacttccttcattgagccgccgtttaattcagacgaatctttcaaaccggtcacaaatccttgaagcttgcgcgggccaaacgggacaatcacccgcattccgacttcgatcatcccttttaaatgatcgggaattttgtaatcaaagggtctgtcaatgtttttggagctgacatcgacaatgacttctgctacattcatacgggttttcggtcctcggttttcaaagcggtcatttccttcagcatttcaaaggaaacgtcaagtttagacataagcgcaagctcccgttttcttccgtcccggaaatagaaggtgacgacattcgtatccgtgccaaatccggctccttctgctttcacatcattcgcaacgatcatatcaaggtttttctgttcgagttttctgcgcgcatagcgttcgacgtcttgcgtttcagccgcaaatccgaccagcagctggtgtgttttccgttcgccgagttctttcagtatgtctgccgtacggttgaattcgatcacgagcgaaccgtctttcttcttcattttgtgatcagaaacagccgccggcgtaaaatcggccacggccgccgtcttaatcaccatgtcgcatgaatcaaacacagaaagcacggcttctctcatatcggctgccgattgcacaggaagaaactgatacagcccgactggcggctctattgacaccgggcctgaaatcagcgtcacccgtgccccgagacggacggcggcttcagcagcggcgtagcccattttgccggtggatttatttgtgaagaagcggacagggtccacggcttcgcgcgtcggaccggccgtaatgacaatatgttttcctttcagcggtgcatcgtcttcaggctccttaaaatgctctctgacacgctcgacaataagctccggctcctccagccttcctttgccgacatatccgcatgccaaatagccttcactcggctcgataaagcggaccccgtcctgataaagcacagagatgttccgtttcaccgccggatgatcatacatatggacattcatcgcaggcgccacccagaccggggcctcagccgccagcaccgtcgttgtgagcatatcgtcagcaattccgttggcaagctttccgatgatatttgccgtagcgggcgcgacaataattaaatccgcccagtcagcagcatcaatatgagaaatcaccttcggattttgttcattaaatgtatctgtatacacttcattccgactcagcgcctgaaatgtcagcggagaaacaaactcacgcgcggactcagtcataatcactttgacgtttgcgccggcctgaaccagcttgctcgtgagtgcggaagctttataaacggcaattcctccgcttacgcatagcaaaatgtttcggtttttcatgaagtcttctcccctttatgaaagcattggacaaatcccaaacggaaaaaaataacaacctatgtagagataggttgctacgtgtgcttgttattcgctgtcttctctttcaaacgaaagcaggcccgcgtcaatttcttctaaagctttgcctacatatttgtgagaaatggtatgttcaatctgctggtcttttttgatctgcatttcacgcgcgcgtcttgcagacacggtcaccagcgtatatttagaatctaatttattcattaaagagtcaattgacggatctaacataagttattctacctccagcattttcttatatctcggagcgacgcgttcacgttttaagtgctcggcgagaacgattgcgttaatcttatcacaagccgtttggatatcgtcgttttcaacgacataatcatacgcgtccatcatttcgatttcagcttttgcggcattcattctgttttcgattaaatcgtcggtttcagtccctcttgtcacgattctgtttttcagctcagaaagactcggcggcgctaagaagataaacaggccttccggaaatgcattccgcacttggagcgcgccctgcacttcaatctctaagaagacgtcttttccttcttgaagcgtctgttcgacataatcaacgggcgttccgtaatagttgccgacatattccgcccactcaagcagtttgttgttttcaatcatgcgttcgaattcatctctagatttaaagaaataatcgacgccgtcgacctcgccctctctcgggtttctcgtcgtgactgaaattgagtattcaaatttcgtgtcctgttgtgaaaatattgcttgccgaaccgttccttttccaactccggagggacctgagagaacgattaataaccctctttctttcatgcggcaattacccctgcccttcatccataatttcttctttcacagaaagtctgtgtgcaactgtctcaggctggacggcagataagataatgtgatcactatccatgacgacaactgcacgggttcttcgtccgtatgtagcgtctattagcattccgcggtctcttgcatcctggatcattcgctttattggcgcagactccgggctgacaatcgaaatcatccgattggcggagatgatattgccaaatccgatattaatcagtttaatcgtcatcttctacgttccccctgtaaaatagacgtctctagtgtaacctgaagagaccgtctgtaaacaatacgcacagtcgctattctatattttgcacttgttccttcaatttttcaatagaacttttcatttcaacgacaagctttgtgatttgatgatcattggcttttgagccgatcgtgttcgcttcccggttaagctcctgaacaaggaaatcaagtttgcggccgactgccccgccttcttttaatatatcacggaattgaacaaaatggctcttcaatctggtaatttcttccgtgatatcagaacggtcggcgaaaatggcgcattccgtgatcagcctgctttcgtcgagcgcgtcctccgtccattccttcattcgggcgtaaagacgctcgcgatattgaataacaacggccgaagcgcgctctttcacctgttcggacagcgtctcaagccgctcaatgtgcagaaagcagtcttccgccaaaagccgtccttctttttccctcatgtcacaaagttcctttacagccagctcagcggcttccctgatgacttcttcaagcttgtcatcacgcatctgttcctcgtgtatctgcgcaatatgttcaaatttaaagaaatccattgcatcgggttctgcggccaggctgtagcgctctttcatgacgcgtgcggcgctcacatattcatcaaggagctcccaatcgatgttcaggcttctttttatgagcgcgtcactgtttacagtgagaaacagctctactcttccgcgctgtatatgctgcaatatcgtttgtttcagcttatcctctacatatagcaaaggccgtggcaggcgggcgttcacttctttgaaccggtaattgacggatttcaattcaacggttgccgagagatcgccttttgtgctgcttgcgctgccgaagcctgtcatactccgtatcatatgaaacacccaattctttcccgttatcaaaataaaagggcaatagacatgctattacccctaagattatatcatatggaattatttttttcttgtcaaaagtgaacccgccagcaaaaaagtaggtatgcccgacataccgataatcagcatccaatcgcccggcgtaatcggcactgttttgaaaatcggctgcagcggcggataatagatgacgatgaccatcaggaagatagaagaaatgatggcgccgagcagatagatattttcaaacggattccgggagaaaacagacgtttcgctccggcagtcaaacacgtgtataagctgagccaggacaagagtcgcgaatgcaacggtctgtgcgtagggcagattttcaggattgcggtgatagacgatgataaacgctaaaatggttgcagctccgattaaaaaccctcttgatacgactttccagcccagttttctcgcaaacactccttctttcggatgccgcggcttccgcctcatcagatctccttccggctgatccataccgagggccatcgccggcagcccgtcagtgactaagttcacccacaatatctgaatcggaacgagcggcagcggcagagcgagaagcatcgcaaacagcatcactaaaatttcaccgacgttggaggcgagcaaataccggacgaattttcttatattttcatagatattccgtccctcttttatggctgatttaatcgtagcaaagttatcatctaccagaatgagagaagaggcttcctttgccacatccgttcccgtcacacccatggcaacaccgatatctgcctgctttatggccggcgcgtcattaaccccgtctcccgtcatggcgacgacgtgtccgttttcctggaacgctttgacgattttcaatttatgttcaggcgacacgcgtgcgaagacgtagacatcatcgaccgtttcgataagttctttctccgtaagctcattcagcgtcttgccgtccatcacacgcccctttttcggaagaagacgcaaatctttcgcaatggcctttgccgtttcaacgtgatcccctgtgatcataaccgttttaatgccggcttcacggcattctttaatcgcctgtctgacctccggacggggcggatcaattatacctgacaagccgagcatcgtcagatttttttccgcctgctccattgttggcttttctccgggcttaagcggtttataagcaatcgcgatcgtacgcaaagcttgcgacgccagctctttcagaaccgcttccgtttctgctttcttttctcctgaaaatggcgcgcttcttgcgtcgtacatcagatgtgacgagcggtcaatcagtacatcgggcgctcctttagtgatgacgaactgctttttttccttatcctctacaatgacggtcatcattttgcggacggagtcaaacggaaactcggcaaccacgcggtattgcccgctgagccaatcgtttgaatagccgccctttcttgcagccgtcagcagcgctccttctgtcggatcgccgtcgagtacataatggccgtctttcagtgcgatttcggatgtgttgcacaacgcgccaaaaaccagcatctgttcaagaatcttttcatctttcggcttgatttcccgctcatctcgggtgaaaacgccctcaggctcatagccgatgcctgacactttaaatgtttttccccctgaccacatatgggtgacggtcattttgttttgtgtcagcgtgccggttttatcagaacaaatgacagaggcgcagcccaatgtttcaaccgccgggagctttctgacaattgatttttgtttgatcatgcgctggacgccgattgataatgccaccgtaacaatggcgggaagcccttccggaatcgcggcgacggccaatgacaccccggccaaaaacatgctgtaaagctcatgtccctgtaagacgccgactgcaacgaccaataccgttaaaaggagcgcgacgataattaaaattttgccgagctcttcaagtcttcgctgcagcggtgttgaaaggctgccggcggattcgagcatatcggcgattttccccattgccgtattcattcctgtaccgacgacgacgccgacaccgctgccgcgcgttacgatcgtacccataaacgccatattgctgatgtcgcctaacgaaacatccggctttctcagtttatcagcttgtttaaccaccggaattgattccccggtcagcgccgattcctcaatttcaaggcttttcgcttcaacgatccgcacatccgcgccaatccggtcgccgcttgaaaatttcatgatatcgccgggaacgagctccttggactgaattttcttccagctcccgtcccgcaacgcagacacatacggcgttgacagctcttttaatgcatgtaaagacttttccgcacgccgctcttgaaaaaaaccgagaaccccattgacaaatacaatcgccataatcgctacggcatctacatattcgcctaaaaacccggatattaaggttgccgccagcagcacgagcaccataaaatctttaaattgggcgaaaaacacggcgatcgccggtgtcctcttgccctcctgaagctcgttcggtccgtgcttttcaaggcgttttttcacctctttttcggtcaacccctgtttaatggacgtatttgttgctttcagcaaatcggtttgtcccatttcatgaaacttcattcttctcgtccactcccctgcctcgctttagagatgtcactctgtaaacaagcttattctgactcgtcccttttcatgctataattatcgaatgcaggaagaaggaaagggtgttttatatgtcttttgatggcatgtttacatacggaatgacacatgaattaaacagccggatcgccggaggccggattacgagagtccatcagccttttaagcacgatgtgatattccatatccgcgctaacggaaaaaaccataaattattattatcggcgcatccgagctattcacgggtgcacatgacaaaccaggcctatgaaaatccgagcgagccgccgatgttttgtatgctgctcagaaagcatatagaaggcggatttattgagaaaatagaacaggccggattagaccggattatgatattccgcataaaaagcagaaatgaaatcggcgacgaaaccgtcagaacgctgtatgttgaaattatggggcggcacagcaatattattctgactgacggagaaggagccatcatcgacgggctgaaacatctatctccgtcgatgaacagctaccggaccgttctgccgggctatgattacaagcttcctcccgctcaggaaaaaatttcgccgcttgccgcggatgaagaagacgttttgcgttatctcagtttccaggaaggacggcttgaccagcagatcgtcagacatttctccggtgtttctccgctgtttgcaaaagaagccgttcacagagcgggtctcgctaataaaataacgctgccgaagacgctgattgaaatgttccatgccgtaaaagattgcagatttacaccgaacattacaacagccggcggaaaggaatacttttatctcctgtctctcacacatgtaaacggagaggagcgcacctttcactcactgagtgagctgttggaccggttttatttcggcaaggcggaacgcgaccgcgtcaaacagcaggctcaggatctcgagcggtttgtcgcaaatgaacggaaaaagaacgccaataagataaaaaagctggaaaagacgctcgactactcagagaatgcgaaggaattccagctatacggcgaactgctgacagcgaatttgtatatgctgaaaaaaggtgacaaagaagcggaagtcatcaattattatgatgaagaaagtaagacagtgaccatccctttaaatccgaacaaaacaccgtcagaaaacgcgcagatgtattttacaaagtatcaaaaggcgaagaattccgtcgaggtggtaaaagaacagatccgtctggccgaggaggaaatcgcttatttcgatcagctgatccagcagctctcctccgcgtccacaaaggatattcacgaaataagggaagagcttgtggaaggcaaatatctgcgaccgaaacagcagcggggacagaaaaaacagaagcagcacgttcctgttttggagcaatatgaatcttcacggggattgacgattcttgtcggcaaaaacaataaacaaaatgagtacttaacgacaaaagctgccgcaagggatgatttatggttccacacgaaagacattccgggttcccacgttgtgattaaaagcagcgatccggatgaacaatccatactggaggcggctgcgatcgccgcttatttttccaaagcgaaagattccggctccgttccggttgattatacaaaaatcagacacgtgaaaaagccaaacggcgcaaagcccggatttgtcacctatgacagccagcacaccgtatttgtcacacctgatgccgaccttgtcatacggctgaaaaaataaacgcacctccaagctgaaatccgcactcagcttggaggtgttttttattacgtataaacggagacgaaactttcccagccgtcagaaccgatctttacaatatctgatcagtttcccgtcatgtctgcctgatccgccggggccgtctgtgattaaagcggtcacacctgatttggcggcggatgctgtcaacttccctcgccgcacctgagcacatccgggcgggtctctgacctttcctttgtatgcgggcggaatccaggcggcattgggatcagatacatattccgtatcacttcgcaatcctgaccgcttgtcggcatataccgttcaaactgcccgctttcgttttgaattgttcacattcgacggactgtcaggacagtataaaaaacaccctgcctgatgacagacaagatgttttttatggtcttcttcttttctcaaataatcgatccacttcttcagtcaaatcagcagtaatgagaggctctatgtcctcagccagtcttttcgtatgtgccgggcttgcgccgcttgttgatacggatacttgaatgcgccctttgcggatgatcttcggcatatacacgctgccctgttcagcatcgcttacacaattgaccagctgcgtttcagaagcgctcgcggctatctcctgattcacgctgcgttcatttgtcgcggcaatgatgaaaaaagcgggcgcgagatccttcatttcaattttacgggaaacccagcggatacgtccttcatccgccagctgtttaatttcaggcagggcatcgggactgattacagttatatccgcgccttccggaagcaccgttttgagccttcttaaggcaacattgcctccgcccgcgatgataattctttttccgcttaaattaatgtgcagaggcagcatactgtccccccttaaaatcaaactgaccgccggggtttcgaacagcttctgacacacggttcaaaaacgcctgcttaatatgagggtgaaaacctaagtatgaagcgagatgaacattttgattgatcgtttgaagcttttgaacttcccgttcaatctcagtcattaaaagcccggtaaacagaagatatggaacgataaaaacgggtgctccgtcatcctcttcaaggccggcaaacacttctttatagtgcgggtcacatgctgttaaaaaacaagggatgacttctttaacaggtgtaatcgcctcaagttttccggcaatctcaccgactgcgtttttaactgccggatctgtgcttcctcttccgatcagcaccactttcgcctgctcaatgggcactccggtatcttcaatgcgatgatgcaccgcttttacgacttcatcgtccactccgatcggaacaccatatgtcacttttatatcgggatgcagggccgccgcacgggcgatttcagccggaatgtcatgttttgcgtgggcagcggtcaacagcagcaaaggcacggccgcaatatgagtggcgccttgtctgacacatgcttcaaatcccgcttcaatagacggttcctgcagttctaaaaaacaaatttcctgaatgggagcgtcagcgtgcggcatgcacccttttaaaaacgccgccgactctgtctgcgcttttttcagcctgcttccgtgcccgatgtataaaatcgcctgcttcatttacaacgcctcgctcaaatccagatttttctgatcagatgcataccagtccagtttgcagtgataattgacgacatcaccgataacaattaagctcgggtttttgatttcttcttttatcacggtgtctgaaagcgtgccgacggtgcagacgactgttttttgcctgtccgtcgttccccaatgaataaaggctgccggggtgccggcgtctctgccgttttccagcagcattctttcaatctgccggatatttttaattcccatataaatcaccagcgtatcaatacccgtcgccagcgctttccatttttcttcaaagtcgtcttcttgtttataatgccccgtaacgaatgcgacattggagctcgcctctctatgcgtcacgggaatgccggcataagcagcagccgcgattcctgatgtaatgccgggaacgatctcaaacggaatggcgttttgcgcgagagcctccgcttcttcgcctccgcggccgaaaacaaacgggtcgcctcccttgagccttacaacggttttcccttttttcgcatacttcacaaggaaacggttgatcgtatcctgtttcataatgtgaaaatccgggagcttgccgcagtaaatcagatccgcctcttctccggcatactgtaaaatctctttgcttaccaatctgtcatataatataacatccgctttttgtatggctttcattgccttcaccgttaataagtccggatctcccggaccggctccaacgataaatactttccccatagcatgtctccccgatccgttttgaaatcttcccagaacagccgcgaggccgcacttcagctattttaccatatcccgccattgcgggggatatccggctgattgcgcggcctttttggacctattatgctaagctgtttttcacaaagtcaaccagtcttccggtgcattcttcgcgttcacatttgcctgaatcaagtacgagctcaggcgctttcggctcttcatacggtgagtcgatccccgtaaagaacggaatttcaccatttcttgcttttttatataaacctttcggatcgcgcttttcacatatatcgaggtcgcatttaacatagatttcattaaattcgccctctgccacaagctctctcacctgatctctgtcctcacggaacggagaaataaaagccgtgatgacgatggttccctgctgaacgaaaagcttcgccacttccccgatgcggcgtatattttccttgcggtcatcatcggaaaaacctaagtccttgtttaagccgtggcggatgttatcaccatcaagcacgatgacttgatagccttgttcaaacagctcgcgcgctgcggcgtttgcaatcgtggatttccctgaaccgcttaaccccgtcagccagaggatagagcttttatgcttgtttttctgctggtattcttctttcgttattgaggcttcatgccacacgatatcacgatttgtcactctattttcctccttaagaaacgcctgcttcttctttcgttttcagccctttaatcaacacctcgacaacttcaggacggctgaattccgccggcggcatgacgccgcttcgcagcatttctctgacctttgttcctgacagaatgacgtggtcttctctttcatgcgggcatgttttggccgttcccatgttgccgcatttctggcagaagaagctgtgctcgaatttcatcggtgtaatcccgagttcatccgctgtaaattgatcaaacagctcttgcgcttcatatgtgccgtagtaatcaccgacgccggcatgatcgcggccgacgatgaaatgcgtgcagccgtagtttttgcggacaagcgcgtggaaaatggcttctctcggccccgcataccgcatagccgccaaaaatacgccgaggaaaacgcggtctttcggataataatgatcgagcagcacctggtagctttccattctgacatccgccggaatatcatctgattttgtttcaccgacgagcgggttcaaaaacaggccgtctaccgtctcaagcgcggttttttggatatattcgtgggcgcggtgaaccggatttctcgtttggaaaccgacgatggttttccagcccttttcttcgaagcttcgtcttgtatcggcaggttcaaatgtaaactcgggaaactgctttgacgcttttttaattaatgtgatcggcccgccgacatacgtatcgccgcgtgaaaataattttttcacgcccggatgcgcggcatcatcggttttatatacgtgaacggcttctttttgtttatccggcgtataaatatcttcgatgtcgacgacgccgtatgtttctccgccgtaagtcagtttcaccgtgtcgccgacggcaagctcagcagctttttctgaatcgaccggaagcgtgatcggcagggaccagacaaccccggatgccagacgcatattttcaacgactgacacgtaatctttttctgtgaaaaatccttcaatcgggctgtaccccccgatcccgatcagctctaaatcagcgaacgaaatcaaatcaagctcaatttctttttggacggatgtaagatcatactgctcattcacccggttaattaatgttcctccgtgcggtgctaaactcataatacatgattcctcccagttaacagataaataaactcagattaatagttaaatgcctccgccttgttcatggacagagcgtttctcttttcggatggctttcatcagactggcggctccgccagctgccaaaagcacgctggccatcataaagatggaatagtaatctccttttaacagcagggagacaagcagatacgaaatcgacagtgacaaaaacggcgaaacgacccatactttgagcatcgttttcacgacttctttatgaaaaacgttcggcccgtttttggccattccgatgccgataattgatgatgatgtgacttgcgccaatgggaccggcagaccgaagacggaactgataatgacaagccccgcgccggttcctgaaagcagtatgccttctccggctgaaaatctcgtaatctttttcccgttggtttcaagcactttacgccctaaaagcagagcgccgagagcgacaaagatgcctccgtacagcgttcctttggacacgctgagcacgcccgcagcaaccaaagggcccaccgcatttgcgacattgttcattccggctgaaaaagcttcccaaaaccccgcaatcagcagcacaatccctaaaatcttctgtttccgattcgaaatgactcgaatattcagagaactgaataccttcgagacgagaaacgtgaaacagaacgcgacgaacggtacgagcacccaaaaacccacgatgaccaaaagatgctgtaaaaacaatactttgtacgcgacgccgacaccgacaatcgccccgacagtgacctcactcgtcgacagcggaatgccgagcacattcgccgtgaatagcgatagcgccgccgatccgataataatgcagacaatggtgagcgtaatggtttgttcgggaatgattccgccgctgatcgtcttaacgacttcaccgccgccgataaccgcccctgacaggactccggccgcgcagatgatcagcgcatacgttttctttttaacggcgccggacccgtaagcgactcccattgatgccgcggccccgctggctccgatattcatggcaaaaaacaggcagaataaaatagcggctaattccatcgtgcagctcctttattcatgcagtccgcattctgttttcgccatgccgttccatctgccgctccgcaaatcttccgcggtaaacgcaggtgaagtgcacggttcacagccgatgctcggatacccctgatcatggaggatattgtaatccagctcatgcttggaagtatatctccagatgtctttccatgtccaatggatcagcgggcatactttaatcgattgaaacttgtcgtctttattcaggaaattcgtattcgcccggctcggtccttgatcccggcgaaggccggacagccatgccggatgccctgcgagcgcttctcttaacggcagaatttttctgatgtagcaacactggttcggttctctttcccacagtttatctccgtgagcctcggcctgttcttcaagagtaaggctgggctttttcaggataatgttcagccccggataacgttctttcactttttcgatcgtttcatatgtttctttaaagtgaagacccgtatcgagaaacacgatttccgcgtctttctttactttagaaattaaatcgatcaggacgatgccttcaatcccgaagctgcatgcgtaaacaagctggtctccgtagtggccgtatgcccattttaaaacggacagcgcgcctttataggaatcgtcttccggaaatgtaatcgccggctcttcccatgtgtcatacgttagcatttttcctttcctcctcccggagacaatcaaacagctgttgttttctgccggttgtcttatccctcaatctttttttcatataaaaaactttcaatccagcggaatgaaagacagtgacccggtatagcccttatcttcaaaatgctgtgcatttttctggatgcggcaccttgcaatacacgcaggttgccgggcgtcatcggtccagtccctcagccgctcttgataagctttttagatttgtactaaattttagcacaattctaacagaagtcaacccgagttttttgataggaataataaaacaggccctgaggcctgtttttattgtcattattttttaaaccaatcttttgactcgggattctgtttccatgatttcagtttctcaatgtcatctgaatgtatcgttccgttttcaagcgcgacttcaatcagcgtgtcataatccgttaacgagtaataaggaagacccgcttttttaaaggcttcttttgctttcggcagtccgtatgtaaaaatggaaatgacgccgaggacttccgcgccctctctttgaagggccgccgcagcttcaagcacgctgcccccggtagaaatcaagtcttcaatcacgactgttttttgtcctttcttaatggcgccttctatttgatttcctttgccgtgcgctttcggtttgcttctgacgtagcacatcggcgcgcctgtacgatccgcgagaagcgcagcatgcggaatgcccgccgttgcagtgcccgcgatcatctccgcctcggggaaatgctctttcagcagtttgccgagcccgtccgccacatcatttctcacttttggatacgacaatgtcagacggttgtcacaatagatcggtgataaaatgccgctcgcccacgtaaacggctcattcgggcgtaaaaagacagcttcaatgtgtaatagatgttttgcgatagcctgtttcatcggcgaacgccctcccattccagtttaattgcttcatatgcttcaacggggttttccgcttttgtaattgagcggcccacgacgatggctgacgaaccgttttctttcgcaaatgacggagtcgccgtccggacttgatcgtcagctgcgtcactggccgtgcggatgcccggcgtgactgtgagaaatgaagaccggaccgcttcataaatggctttcgtttcatgtaccgaacataccactccgtccagcccgcactcttccgccattttgccgtaatgcacaaccgtttctaacagcggcttatgcagcagaagttcttccttcgccacctgctctgaagtgctggtcagctgcgtcaccgcgattaaagacgggcgttttctgcctgccggcgtgccttcttcaagcccctcaagggccgcgcgcatcatgcgtgcgccccctgctgcatgcacattgacgagatcaacgccgaggccggccagccgcttcatcgctttattgaccgtagtcgggatatcatgaagctttaaatctaaaaatatatcacagttccgttcttttaattggtgaatgatggcggggccttcctgataaaaaagttccatccccgttttgacaaaaagcctttccttttcaaacaagtctaaaaacgttaaagtctcttcccctgatgcaaaatcaagcgcgatgatgggcaggttgtttttcatgtttccagctccttccgatgcattcacttacagattgaaagccgtgttggcgcagcacacgggggagctgttctatgatttccgggcagacgaacggattgacgaagtttgccgtgccgacggcaaccgcactcgctcccgcaagaagaaattctaatgcatcctctgcggtctgaacgcctcccatcccgataatcggaatttgaacggcctggctgacttcgtataccatccggatggcgaccggtttgatcgccgggcctgacagtccgcccgttttatttgctaagatcggccggcccgtcttgagatcgagcctcatcccgatgagagtattaatcatcgtcagaccgtcagcaccggccgcttcaatcgctttagcaatttcggttatgtttgcgacattaggcgaaagcttcacatacacaggcactgcggaaacttctttcaccgcttttgtcagttcggccgccatgacgggatcagtaccaaaagcaatcccccccgttttgacattcggacatgaaatgttaagctcaagcgcatgcacattcggcgcttggctgatgtgctcggccacttctttatagtcgtccacctgagaaccggcgacatttgcgataatcggcgtgtcaaattgttcgagccaaggcagctcatgattgagcacatgctcaaggccgggattttgcagtccgatggcattcagcattcccgcgcttgtctccgccactctcggcgtcggatttccgaagcgggcttcattcgtcgttgctttaatcataatgcctccgagacatgataaatcgtaaaatccggcatattctttcccgaatccgaaacatccggaagcggggatgatcgggtttttcaattggagacccggcagattcacctctaacattacagcgccacctcctcagctttaaataccggcccgtcaaggcagacctttacataggatgtatcgctttcactcgtgcggcacacgcaggcgaagcaggcaccgatgccgcagcccatccgctcttccatcgaaagataaacctctttatggccgtactgctgcttcagagctttcagcatcggtgtcggtccgcagcttagcaggacatcgaattcgagctgcttttcacggatgacatcggtgacaaaccctttctctccatatgttccgtcagccgtcgccacataagtgtctccgtacgcacgacattcctgttcgtaaaaaacatcctttgctgattgaaatccaagcacatgaatgacgtttacgcctttttccgtcaggcgctttgacagttcctgcaaaggcggaaccccgactccgcctccgactaacagcgcggttttgccgggttcaatccgccggacggggaacccgttgccgagagggccgagaacgtctatcctgccgccctcttttttctcggacaaaagacgcgttccctcaccgtcagctctgtagataacggatacttcattcgcggcgaaattgacgtccgcaatgctgagcggtcttcttaatagcggcgtgaccgcgtcactcaccttcagatgaagaaattgacccggctcagtaaggtgccggacaagctctcctttcagcaccatcttataaatccggtcggcaatttctaagttggattgaacagtcaaatgcgctttcttcatatcgtgactgccgccttttgattggtttcggatgcaggcatatgatccgcccggaatgtcatgctttccaacacccgcaaaatggcttcggccgtatctaaagatgtcaggcaggcgactccgttttcaacggattcgcggcggattctgaagccgtctctggccggctgtttgccctttgtcagcgtattgatgacaaattgcgcttcgccgtttctgatgacatcgagcagatttttcccttcttcgccgatttttccgacgacttgagccggtatctgagcgtctttcaaataagccgccgttccttccgtcgccaagattttatagccgatggcgtggaaccgcttggcgatcagcagtccttcttctttatctttatcggcaacagtcaacagcactgagccgtagttcgggatttgaatgccagaagcaatcagcgctttatagagcgctttttccagggttgaatctttgcccatgacctctcccgtcgacttcatttcagggcctaacgtgatatccactcttctcagcttcgcgaatgagaagacaggcgctttcacgaataccccctgctgttcaggctgcagcccctcttgatagccgaaatcagcaagcttttggccgagaatgacctttgtcgccaggttcgccattgggatttttgtgattttgcttaagaacggcacggttctgcttgaccgcggatttacctcaagcacatacacctcaccttgcgacagtacgaactggatgttcagcaacccgatgatgttaaggccttttgctaaggctacagtgtattgttcgatttttttcttaatgtcttcgcttaaagactgaggcggatagacggcgattgaatcccctgaatggacgccggcccgctcgatatgctccataatccccggaataacgactgtttcgccgtcagatacggcatcgacttcgatttctttccccgtcagataacggtcgattaacaccggatgctgcgggttgattttgaccgcatttttcatatagtgaagcagctcttcttcgtgatagacgatttccatcgcccggccgccgagcacatacgaagggcggacaagtaccggatagccgatggatgcggcgattttgaccgcttcgttcaccgatacggcggttttcccgagcggctgcggcacattcagcgcttcaagcgcctgctcgaacttatcccggtcttccgcacggtctaaatcttcaagtgatgtaccgagaattttgacgccgcgggcgctcaattcttccgcaaggttgatcgccgtctggccgccgaattggacaacaacgccttccggctgttccaaatcaatgatgtgcatgacatcttctaccgtcagcggttcaaaatacagtttgtctgatatgctgaaatcagtggacaccgtctcagggttgttgttgataataatcgcttcatagcctgcctgcttgatcgcccagacagaatgaacggtcgcatagtcaaattcgactccctgtccgatacggatcggcccggaaccgaggacgacgacgctttttcttgatgtaacctcagactcgttctcttcctcatatgtgctgtagaagtacggggtttctgattcgaattccgccgcgcatgtatccaccattttatatacaggcttgatgtctgcttcttttcgcatttgatacagctcttgttccgccatattccattcccggctgatatatttgtcggagaaaccgagttccttcgctgtctgaaggacggcgaggctgcctttttccgctttcagctctgtttcaaaagcgaccagcttacagagcttgtgcaaaaagaatacgtcaattgcggaaaactcatgaagctgctccactgtgtagcctcttctgaacgcttcagcaagataaaacaggcgttcatccccggcttttctgatccgtttttccaaaagtccgtcagaaatctcttccgcatccttcagttccaggtgatagacatcggcttcaagtgagcggaccgcctttaacagcgattcttcaagggtgcgtccgatagccatgacctctccggtagctttcatttgcgtcccgagcctgcggtttgccgactcaaatttgtcgaacggccagcgcgggattttagaaacgacatagtcaagtgcgggctcaaaagccgcatatgtttttcccgttacgggattcatcatttcatcaagagaaagcccgactgcgattttcgccgcaagctttgcgatcgggtaacccgtcgcttttgaggcgagggcagatgagcggctcacccgcggattcacttcgataatgtaatattggaagctatcgggatcgagtgcgagctgaacattacagccgccttcaatgccgagcgcgcggatcagctttaatgaaacattgcgcaaaagctggtattcccggtcgctcaaagtctggctcggggcaacgacgatgctgtcacccgtatggatgccgaccggatcgatattttccatgttgcagacgacgatcgcgtgatctctgctgtctctcatgacttcatattcgatctctttgtaaccggcaatgcttttttccagaaggcactgatggacggggctgagttttaatccgttttcgacgatctctttcagttccgcttcattcgagcagatgccgccgcccgttccgcctaatgtgtaagcggggcgcacgataaccggaaacccgatccggccgacaaattcctcggcttcctgtaaagtgcggatgatctcactttccggcaccggttcattcagctcattcatcagcgtacggaataagtcgcggtcttccgcctgctggatggcggacagctttgtgccgagcacttccactccgcattcctcaagaaccccgagttcagacagctcgacggcaagattcagtccggtctgtcctcccagagtcggcaggatggcgtccggccgttcttttctgataatacgcgtgagaaactccggcgtcagcggttctatatatacccgatcagccatttccgtatccgtcataatcgttgccggattcgagttgacgagaatgacttcatagccttcttcctttaaagcgagacacgcctgtgtgcccgcataatcaaattccgccgcctgtccgataataatcgggcctgatccgatcactaaaatctttttaatatctacgcgttttggcataccgcttccccttctttctcagttgtttcgatcaagtcaatgaatctgtcaaataaatgattggcgtcttccggccccggtgaagcttcagggtggtactgaaccgtaaatgccggcaatgttttatgcttgagtccttcgatcgtttgatcattgatcgcaatgtgcgtcacttcaagctctgtctcatctattgaagaaactgtatatccgtggttttgggcggttaaagcgactttccctgtcgcaagctctttaaccggatgattggaacccctgtgtccgaatttcattttttccgtttccgctccggatgccagcgcaaataattggtggccgaggcagattccgaataacggcaccttcccgagtatgccttttatcatttcaatggcttccggcacatctttcggatctccgggtccgttagaaagcatgatgccgtccggcttgagctgaagcacttcttccgccgttacattgtacggcacaacgatgacatcgcattttcttttgtttaactctcttaaaatgccgtgcttcataccgaaatcgacgagtacgatgcgtttgccgcggcccggactcggatatgccgttttcgcagatacttgagcgacttgatttctcggcagttccgtttctttcagccttgcaagaacctctccgacattctcctcacttgaagcaaacgttccttttaatgcgccggccgtgcggatcattcttgtgagctttctcgtgtcaatcccttgtaagccggggatatttttcattttcaaatactcgtcaagcgtgtaagccgaacgccagttggaaggcagctcgcacagttcttttacgatcagcccttttacaaaaggagtgatggattcaaagtcatctctgttaattccgtagttgccgatcagaggatacgtcagcgtcacgatctgcccgcagtaagaagggtctgataaaatttcctgataaccggtcattcccgtgttgaatacgacttcacccgctgtatgttccaggctcccgaatgcttcaccctcaaataccgctccattttccagcactagtcttcttttcatttgacgagtctcccttcttcgtatgcaagcttaccggcagccatcgttgcaacaggccagccgaagcacttcatcttgttgaatggcgtattttttcctttagataaaaatgtatctttgtcaatggctgcttctttttccagatcaatcagggtgatgtcagccggcgcccccggtgcaagcgttccgtacggaagatcaaatgcctcgcaaggttttgccgtcatgaaatcaaccagctgcttcagcgtccacgccccgtttttcacaaaatgtgtgtacagaagcggaaaggctgtttctaaaccgacgataccgaaaggcgcaagcttcatgtccgtgtttttctcttcttctgtatgcggcgcatggtcagtggcgatgaaatcaatcgtgccgtctaaaagcccttcaatcagcgcctctctgtcctctttgctgcgaaggggcggattcattttaaaattggtatcaagtcccgggatatcttcgtcacaaagcagcaggtggtgcggcgatacttccgccgtcacgcggattcccgctttttttgcgtctcttacggctctgacggattctttcgtgctgatatgacacacatggtaatggcagcccgccgcttccgccagcaggacgtcacgggcgatatgtaccgcttcacaaatggaaggtatgccgttcaggccgttcgcttttgaaaaagaaccttcatgcacgctccctccgtaaatcagtgagttatcctcacaatgagcgacaatcgctttatttattgaagccgcccgtttcatggcttcatacatcattccggccgtctgaacgccgacgccgtcatcggtgaaggcgaatgcgccggcttcatgaagcgcctcaaaatctgtcatttcttcgccggtttgtctgatcgtaatggatgcgtaaggaagaaccctgacagatgaggtttctttgatccggttttgcagccattccatctgctctttcgtatccggcaccggtcttgtattcggcatggctgcgactgtggtaaagccgccccgcgccgcggctttagagcccgtctcaatggtttcttttttctcgccgcccggttctctgaagtggacatgaaggtctacgagtcccggtgaaacgaacagtcccccagcgtcgatcaccgtttctccgtctttcgctgtcagaagcccggtttccgaaataaattcacccgttacccggatatcctgtgccactttttctccttgttcatttaacatccagccgtttttaatgagataagacataagccgcttctccccttttcacattggtttgcagtgctctttttaagactgccattctgatatacacaccattttccatttgtttaaagattcttgattttccgcattcaactaatgttgtgtcaatttcgactcctctgttcaccggtgcgggatgcatgatgatggcatgccgcttcatgctctccgcccgctttgcggtcagcccgtatgcttccaggtagcctttttggtcggcttctgtctgatgcctttcattttggatgcggagcagcatgacgacatctgaagcttgtatggcttcatccgtctgaacacaggtgccgaaggcgtttttctcatcctgccattgcggcggaccagaaaacagtacacgtgcgccgagccttgtcagcacttcggcattcgaccttgccaccctgctgtgtttgatatcgccatgaatggaaaccgtcaggccctgaaaggtctcaaattcctcttgaatcgtcattaaatcaagcaatgactgagtcgggtgctggccgcagccgtcgccggcgtttaagatcggaatattgactctgccggtcagatctttgtaatattcatccgtgctgtgcctgatgacgcaggcatccgctccgattgattccagtgttttgaccgtgtcatataaggactcgcctttttgaacgcttgtgctcgtgccgtctaagctgagcacgttcattccgagtttcttttccgccacttcaaagctgaaccgcgtcctcgtgctcggttcaaaaaacagattcgcaacgaattttcccgggagatcgggacggactgtaccctcttttatcgcttttgcctcacgcagcagttctgtaatttcagcagtgctcagttcagacatcgccgttaaatgattcatgtttttctcctccgtttccgcttgaaggccgtaaaaaacaccccggtctatagactcggggtgcggttaaagagagaagcagcgtacagcttcttcccgttataacccttccaagcctctctggactttctttaaaaggttttacatatgattttgtttttctgatgcaatcgcgtcttcttcatttgcatgcggcaggataaggttcaggatgactccgacgattgccgcaagcgccatgccggatatttggaacccgccttttgatacttgaataaaagcccctccgacgccgatcacgaggatgacggatgtgataattaaatttctcttgttttcataatcaatgttgttgtcaatcagcattcttaagccgctggaggcgataattccgaagagcaggaaggaaacgcctcccataaccgcggacggaacagagctgatcagcgctgatacttttccgataaatccgaagcacagcgcaatcacacccgcgccgccgatgacaaagacgctgaaaactctcgtaattgccagtacaccgatgttttcgccatatgttgtcgtgggcgggccgccgattaacgaagcaatgatcgtcgctacgctgtcccccattatggagcggtgcagtcccggctttttaatgaaatcctgtccgacgactttactcagcaccatttggtggccgatatgttctgacatcgtcacgaaagcgaccggcaccatcgcagccgcaatgcccaatgtcactgacggcgtatagtctttgaaagggatgataaattcaggaacggcgaaccactttgcatcaatgaccggctgaaaattgacgatgccctgtgtcagcgcaaacagatatccgcctataatgccgatcaataccggtatcaggcttaaaaatccccgtaaaaagatggcgcagataatggtgattgccaaagtgacgccggctacactgaaatgtttcaagctgtagacgagttccttcgcattcggatcagcatacattgccatattgacggctgtgcttgccagtccgaggccgatgacgatgatgaccggcccgacgaccaccgggggcagcagcttcatcagccaccccgttccaagctgcctgatgagaagtgcgatcaggccgtacacaattcccgccaggaaagcgccgaccatggcagcccccggccctcccgtcgccttcaccaagataatcggtgatataaaggcgaatgatgagccgagataagcgggaatctggccttttgtcaccaagagataggcgagtgtcccgattccgctcgtgacaagcgccactgccgggctcattccgaccagtttcggcacgagtatggttgaaccgaacatggcgaataaatgctgcaggctgaatgacagccaggacaatggattggggacgtccctgactcccaggtttacttttttcttactcatggcgttttcctcccggttgactttcaaatggtataaaaaaacctctttgctttttgcgcaaagaggcatacaaaacccggccgcgtcgatccgcccggctctgtgttttaaaatcctctttgcaaactctctggaatgcatttaaaaagggtgattattcattttcgtaaatggcgaccatatcattgtgatcaacttcgctcagctgaaccatcactttttcagcttttgaggtcggaatgtttttcccgatatagtccgctctgatcggcagctcccggtgccctctgtcgacaagcacggcaagctgtatcgatgacggccgcccgacatcaacgagggcatccatcgcagctctcaccgtccggccggtataaagcacatcatcaaccacaatgaccttttggtctgtgatatcggccggaatgtccgcgccttttacaagcggctcttcattgctcgtttttttcgtcaggtcgtcacggtaaagggtgatatcgatttccccgacggtgaccgggttcccttcaatctgttcgatccgctcggccagccgcttcgctaaataaatgcctcttgttttaatccctacaagaatgcagtcattcattcctttattccgttcgatcatttcatgggctatccttgtgagcgcccgcctgatcgcctgttcgtcgagaataacagctttttgattcactcgtgacacctctccattcgtatataagaagaaaaaacccctcctgccagagcatagaggggttcctttccaggacgaagacacatgcgtatctcttctgtcctatccgttatccttctcagcctctctggactgtgttaaagaatctattcagcttgtttttattatttcagaaaagaaagtcgctgtcaatggctatttcttaaatcttcaatgagttttttcatatcttcaggaaggggcgcttcaaactcaatgtattcgcccgtccgcggatgatcaaaacctaatattccggcatgaagcgcctgaccattgaaatcaatggtttttctcggtccgtacttcggatcgcccgccaaaggaaacccgatatatttcatatgaacacggatctgatgcgttcttccggtctcaagccggcactctacgagcgtgaaatcttgaaaacgctcaagcacgtggaaatgcgtgacggcgtttttgctgctttctcttgttacggtcatgctttgacggtcttttttatctctcccgatcggagcgtcaatcgttccgtcatcatgtgaaatcaccccgtggacaaccgctgtgtactttctggtcacggttttattgacgagctgattaacgagtgattcatgcgccatatcgtttttagcgaccattaacagaccggaagtatctttatcaatccggtggacgattcccggacgcatgacgccgttaatgcctgaaaggtcattgcagtgagccatcagtccgtttacaagcgtccctgtcacatggccaggcgccgggtgtacaaccatgccccgcggtttgttcacaaccaagacatcctggtcttcatagtaaatgtccaaatccatcggttctgcaagcacgtccaattcttccggttcaggaatggtgacgtttacctgatcgccgggctgcattttgtagttcgcttttacggatttgccgttaacggataccagtccctcttttacccattgctgcacttgagtgcgtgaccagttttctcccgttgaagccaaaaatttatcaatccgttcgctcttttgttcaggctgaacggttatctcaaattgattcatgttattgctccttctttttcccgctgtcaaacagcatatgaataaataaaagtattacaccgacgcacagtgaggagtccgcgatattaaaaatcggatagtgataatccacgatgatgacatgaataaaatccaccacttcctggcgcgccgcccggtcaataaagtttccggccgcaccgcccagcattaaaccgagagaaattccgagtaacatctgcccttttgcataacgctgtatgtaataaacgattccgataatcactgcgatggtaatgacgtagaaaaaccacatttggccggctaaaatcccccacgccgctcccgtgttgcgatgagatgtgatataaagcacctgatcgatgacaggtatgctttgtcccaattccatatggctgacgacaagccatttggtcaattggtcggcaataataataaaaagagcgataagataataaagcacacacgttcctccagtatacagttacttttatcctttatgaattttatcagtaaaagatgccagagtaaaggcagatcataagcgcatgcaaacagacgctgtcattcatacagcgcctgatcatatgcataatctccgggttcccaatatggaagggttttcttttcaaattgagcgggataataaaaatcatcagcggttctggccgtcggcaacaccgcaagtttttcaatcggaatgggggcgcctgttttttcacaataaccgtacgtattgttttcaaacttagacagggcaagaagaacgtcctgaagttcttcttttatatgatagatcagagttgcttcttggtcgttcattgaaggttcaacagatgctgacatttgaaagcaagaatattcgaataatcttgattgaagttcttctttcatcatgagaagctccgtgtggattgcggtcagttgatcattcattcatcacaactcctgctcttgatgttatggctttattgttgcccccagagcgccatttgaagcccataagatttttcctgtcgttctaatcgatgacattgctggcatgtaaaaaagcgcccggctggcaccgggcgctttctcatttattatttttgataatatttttcaacgatttccgcattgcgcagtgataacgtcggatatttcggattggctccgacatctttagaaattacgcgggaacgttcacacatctggccttccgctttttctacggtcatttttcctgttgtgaagctttgcgcgttttccggcgcttcactttcgtcttttactgtcagttctgaaacgataaacagctgcgcgatattttctttaatggatgacaagaggtcgcggttttctttgttcggatacaaagtcaggctcgcttccaatgatcttccgataattttttcgttacgggctgtttccaaagctttcagcacgtcgtttcgaagctccatgaagcggtcgaacttttcttctgtcgcttgactgtccggaacagcaatggtttccggcatatctgtcagctgcacgctcgcttcttcaacaaatgataagtgagaccacatttcatccgccgtgtgcgggagaatcggcgccgtcagcttcactaacgccagcagcgtttcataaaagacggtctgcatgctgcggcggtccggatgatccgcatgctcgatgtacacaacatcttttgcaaaatcaagatagaaggagctgagctcgatcgtacagaaattgtgaatgctgtgataaacaaccgcaaattcatattcatcgtacgcttttttcaccttatcgatcagcttattcagcttgatcagcatatattgatccacttcgcggagatcttttacatcaacggcattgacgcttggattgaaatcgaacaggttgccgtgaaggaagcggaacgtgttgcggactttccggtatacttccgcgacctgcttcagaatatcttcagaaaccgggtgatcggcctgatagtttacggaagatacccataaacgcagaatttcagctccaagctgttttgcgatttttgtcgggtcaatcgtattgccgagtgatttactcattttacggccgtttgcatcaagtgtaaatccgtggcttaatacgcctttatacggcgctttgccggtgactgcaacagcggtggaaagagatgagttaaaccagccgcggtattggtcagagccttcaaggtataaatcagccggacggacaagatcatcacgttcttcaagaacggcctgatgggaagaacctgaatcaaaccatacatccataatgtcttgctctttcgtgaagattccgttcgggcttcccggatgtgtaaatccttccggcaggaggtcttttgcctctctttcaaaccatacgtttgaaccgtgctgtttgaacagctcagacacgtgttcaatcgtttcgtcagtgatgatcggctcaccgttttctgcataaaataccgggatcggaacaccccagacgcgctgccttgagatacaccagtcaccgcggtcgcgcaccatgttgtaaagacgctgttcgccccactccggcacccacttcgtttgtttgatggcatcaagcagatcggatctgaaatctttaattgacgcaaaccattgcgctgtcgctctgaagatggtcggttttttcgttctccagtcatgcggataggagtgtgtaataaattcgagtttcaagagcgcgccgttttcttcaagcttctccgtgatcggtttattggctttatcgtaaaacattccttcaaagcccggcgcttcgtcggtcatgtttcctttttcatcaacagggcacagtacttctaagccgtacttttggccgacgataaagtcatcttccccgtggcccggagcagtatgaacacagcctgttccggcatcggttgtgacgtggtcaccgagcatgacgagtgaatctctgccgtacagcggatgttctgcagtgatgtattctaattctctgcctttatatgatgcgacaacttcaggattttcaaagccgcatgcctccgctacgttttcgatcagttcagccgccactacataacgcttgtctccaaccttgatgacattgtactcaagatcaggatgaacggaaattccgaggttggcaggcatcgtccacggcgtcgtcgtccagatgatgaagctttctccgttttccagaacgcctttaccgtctttcaccttaaacgcaacataaatagacgcggaacgtttgtcctgatattcaatttccgcttccgctaaggcagattcacttgaaggcgaccagttgaccggcttcagacctttataaatatagcctcttttcgccatctcgccgaaaacgcggatctgctgcgcttcaaattcaggctgaagcgtaacatacgggttttcccaatcgcctctgacgccgagacgcttgaattgttcgcgctgtctttcgatctgctgccatgcataatcttcgcaaagcttgcggaaatcagcgacggacatttctttccggtttacttttttgtttttcgtcagcgccgtttcaatcggcagtccgtgcgtatcccagcccggcacgtacggtgcgttgtagccgctcattgatttatagcggacgatgaagtctttcaggattttgttcagggcatggcccatgtggatgtctccgtttgcataaggaggtccgtcatgcagcacgaatttcgggcggtctttcgtccgttcttgaacaagacggtaaatgtcctgctcctcccagtctttttgcatgtccggctcacgattcggcagatttccgcgcatcggaaaatctgttttcggcattaacagcgtatctttgtaatccattttcattcctccacaacatttttcagaaaataaaaaaagccctctcatcccataagggacgagaaagcttatctcgcggtaccacccttttagaaaaaacggatcatccgtcttttcctctcgaacatcgtaacgtgatggaacgtcctatcctactctcggttcagaaaggaaactaaagggctgatctgcatgattccggccatcccgggctttcaccttccccgggtcgctttatagcctgttttgagtcatgccggtccctttcaatcgtcttttcatctgaatttatgaacgtattatattcgaacgggccggagaatgtcaagaaaatcagaaaattattctttttcctcaaataccgcgtcgacttcgtattccagcagatgatcccaatcatcgttcttcagcaggtcgagctgcgcctcaatcagcatttggaaacgtgttctgaagactttagactgttttttcagctcttcaatttccattgcgatttttcttgatttggaaagcgactcattgatgatgcgatcagcatttttttctgcttcacggacgatcagcttcgcttctttttgcgagttgcgctttacgtcttctgcggcttcctgggctacgagaattgatttattcagcgtttcttcgatattggcaaagtggccgattttttcgtccagctcgttcactttcgcctcaagctccgtttttttacggagtgcgatttcgtaatcttttctgacctgcattaaaaattcatttacttcgtcttcatcatatccgcgaaaaccttttgtaaacgttttgttatggatatcattcggcgttaatggcatattgccacctccatttttacatttcagtacggttatctagttcacattataaaacaaatacggcacagatggagaaaaaaactgaaaaaacgactcatttttgccgttcaaatgtaactttccatttgtcttttttcgtttttccgtcaacttttgccaaactgcatcgtccgaagccgcgaatcgagagcatgtccccttcagcaacctgataagacggatcttcaatggctttccaattcaccttaacgagcccgtttttcacaagcgcctgcgctttctgacgggattgcctgctcattgaagcgcagacagcgtcgagacgcaatgaagaaaccgtgtcatcccttatttcgacatctgaagcgggaatgtgaagagcggaaagctcgattttctcaagctttaccggcgctttgcccgccttggtcagctgagtgctgacaaaatcggcgatttcaccggagacgatcagctgcacggcttcctctgagaaaatcagatcgccgtatttctgccgctttaagccgatccccattaatgatccgagaagagagcggtggtcaatgctgacgaatttttcagcgtattgaacgtcaaaagcccgaagctcaaaatcatcctgttcaggttccatatattcagggtataaaatcgcgcgtttgcgctcagctctgtcatatcctccgaaaaacgcaagaccgcaggcgtcgccgataacggcctttacaatgacctgttctctgggatctaagaaatcagtcagcttcatccgatactggtccaggacaatctgtttccattcaagcgcctgatcaataaaaggccgctcgtcttgtctgaagtgctggtaaatatcgctcatgttctttcctttctatgtaaagaggcttggctggtgccaagcccgtatcaaactgtcgcattcaagtatacattgcgatcatgcggtataggccccaaagtcccgtcgtggcaaaccgaagcacgataatcgctacaatcggggatatatccagcatggcaatgggcggaatgatccttctgaacggctctaaatacggttcgcaaatcgctgcgagaaaccgtccgaccgccgtttctctcgtactcggcacccatgacataaagatatagatgatcagggcaaacgagtagatgtaaattaaataactcagaacggaaaaaatttgataaagaatcatcctgctttaccacctctgatgttcgtcttcatttataagctccgaaatcgtgccggaaacgtcgacattatcaggcgtgcacagaaaaatatctgaaccgattctctgaatgtcgccgccgatggcgtagacggtaccgcttaaaaagtcgacgattcttttcgcctgatcatgctggatgcgctgcagattgacgacaactgcccgcctgttctttaaatgatcggcgatttcctgcgcttccgcatatacacgcggttcactcaacaccactttagaggatttctgaacactttgcaagcttactacgttctgcttgccctgcggcttctgagcgtaagcaggctgtttatctttctgctgttcatgctcttcctgatgatcctgctctgtttcaatgtattcgtactcgtactcctcctcatccattgagaaaaagtttttcagtttatttttcatgctcatttgtttacaccccccggttcatttccgactaatgaagagccgattctgataaaagttgcgccctcttcaacagcgatttcataatcatttgacatgcccattgacagttcccggcacggtgcgtttgtctgattcagtttttgcacctgatccctcagatcacgcaattgccggaagcaggctctgatcgtttctgtatcgtctgtcaggggagccatcgtcatcaggccctctacagaaatgtttctaaactcagaaagctctctgataaaggggatgacctcctctgttttcaaaccgtgcttagacggctcaagcgaagtattcacctgcacaaaacagcgaaccgcatgctgcgcccgtttttcaatctcttttgccaatgacagtctgtctaaggaatgaatataagatacacggtcaacgacggccttcacctttctggactgaagactgccgataaagtgccactccgggctgcctttgatgacttcctgcttatggataagctcggcatcccggttttctcccagacttgtaataccggcatcaacggcctcttgagccctttcggctgatacgtattttgtaaccgcgatgacggtaacatcttcggggcttcggcccgatctgttacatgcttcgtttattctttcgtttatatgtcgtaattgatcagcaacacgcaagatcttacgcctccttcattccgataaaggacatcatgcgtcccgttttccctttgtcgcggcggtgtgaaaagaatagttcacgctctcgttcagtgcataaaccgctgacggaaatgttttcttccggaatgccgcaatgtatcagaagaagacggttgacctcttttaaatcaagctgatactggcctttttccgtttcgcatatagcggattcagccgtaaaaggcagcgcccgcacttcattgatgacgcggtcgtcgactgtatagcttcccgcgctgatggacggaccgatgacagcctgaatatctgttaaacgagagccttcttcgtttacccagcgttccgtcatgatgcgtccgatttgtttgaccgtccccttccatccggcatgggcagcgccgataatggatttcaccgggtcataaaaatacaagggcacacagtccgcaaaacaaagggccaaaaaaagattcgcatctttcgtgtagagcccgtccgtcccgcggaatgcggaagaatagtctctcgctccttttcctttatccccggctgtcacgcgccggacgcggttttcatgtgtctggtcggcgaacacccaggaatccagatcagtaccgcataaggacgctatgacttcacggtttgtcacaacatcatgagcttcgtcccggacgtgcaatccggtatttaatgactcatacggaggattgctgaccccgccgtttttcgttgtgaatccggcgatgacctttgtgttaagctgattcacacagttccagtcttctatcatgagtgccgagggggtggtaagactaaacgggtgatatgtattcatggagatccaacctttcgacaaacattaaaaaagcgtaatttcccaatcattttaacacaattttgagcatacgtttagcggctgattgaaaaatgagataaataaatgtgccggaaacattgagatttccggcattttacaagtgaagggaggattacgctcccccctttggttcgtttacacgcactaagatgacatcttccccaattttaactatatttcgccaaggaatgatcatttcctcttcttttccgaaaaaaccgagaacttttccgctgccgcctaaaataatcgcctgaatttttcccgttgtcacgttaatatcaatatcaccgatgcttccgagtttttttccgttcgacacgtttaccacatcttttatttgaaattcagatatgctgatcatccgtatcacgccctttgcccgttctttttcctattatatgaacggccgggctgaaccttgtcacatcgggcaatcttttttgcggctgcaccagccgaggataaatctcagcatgattttcgtatagtccataagctcatcaacagacacttcctcgtttacggagtgggcgttttttaaatcgccgggaccgtatatgacgctcggaatcccggcatgataaagccaccctccgtcagttacggtttgggaaacatcaatgacgggctcctgttttttgacggctgagtgtgatgcagccaagacagaaactgccggatggtccgggtcgatttccagcgccgggaacacctctcctctgtcttcaatcatcgaagatccgccccatttgaacaccggcctgttttctttgagccacagatcactgtcagcgacacgattaatatagtcttcgatttctgcggctgcttgttcgtgcgtttcgttcggataaaagtggacggtgatccataaccggcattcatcggcgacaaacgctgcgtgtcttccgccttcaatgacggcggggttgatcgtattggtgccgggcgcaaagccgggatagcttttcgttaccgcccagtggcgctccagctctcccaaggcagcgatgattttcgccattttttcgatggcgctcgctccgaatgtgcctccgcctgcatgaatcatattgcgcctcatgccgtcatgaaatgtttctttgcttttcaattctatccagccggtgatgactccgccctgcccttgaatatgcaggctgctcgtatccgcgacaaccgcaaaatccgcgtgatagccgcgtttgcagcattccagtgtccccgcctcaccgacttcttctccgattacagactgtacaatgaggtcgcccggaagcttaatgccggcatcatggatcagcttcagagagaaaagaacacacgccaaaccccctttcatatcagcggcgccccttccgatcagcatgccgtcttttacgagcggctgaaacgggtcagagtgccagtcttcgcccccggcttctgccacatcaatgtggccgtttaaaatcaggctttgatgcctgcttgaatctgtcccttttaaaacaccgactacattcgggtcttccggatacacatcccacatatcgaccgagcagcccgtttcttttaaaaagccggccacccacttttgggcttctgccgtatttcttgctggcggggccggagtgggaaaagctatcagtctttcagcaatatgtatcaagtcgtgccgccgtttctccgcctgatgtaaaagcatatcaatctgatgcattggaaatctcccctttggctgtatcaaaaaacccgttcattcatgaaatgaaacgggtaaaaaacggatcttcctccgcttttttcaccgcttccctccgccggcatgatccggatcaggtccgttaagggttgagacaaacgtctctctcagccgcatggcagcacccccagggtgaatttatgttattttacggatgatgcctcttttgcacgtgttaaaaacgggcggccattgttccataagacattgacaggcatatcgaaaaacgctgtaagccgctcgtcagaaagcatgtccctgattttcccggaggcgaacacctcgcccttttttaaaagcagcgcctgatcaaacaccggcagaatttcttcagcgtgatgggtgacataaaggatggacggcgcattttctttttcggcgatcgacgtaatcgtgtccagcagctgctcccttgccataaaatcaagacccgtcacgggttcgtccaaaatcagcagttccggatcagccataagcgaccgcgcaatcagcgctctttgtctttccccttgtgataatgtttcataccgtctgtcggcgtaaccgatggcgcccaaatccttcagaagaccgatcgctttttcccttacctgctcactcggagtttcgtacagcccgattgaggcgtacgcgccgctgagggcgatttcaaaagcggagtccgcggcatataatttgtgctgaagacctgccgaaacaaggccgattttccttctgagcctgtcaccagctctgttttgccgaattgatggccgagcacctgcatctctcctgaagtggggaagtaataagagcataacatattcagcaaagccgtttttccggctccgtttaatccgtacagcacccaattttcgtttttctcgacgcgccagttaatatctttcaaaatccatttcccgtttctttttaatgacacactgtccagctgtaaaatcattgccgtttcccccgtttgctttgtttaaattttcgaaaaacttttacacattagaatacatcacttttttgcaaacgtaaaccatcgcatgaaaaaagcctttaaacaaggtttaaaggctttttccgttattgatggatattcttattcatttgtttaatggctgccttttcaagccttgagacctgagcttgggatatgccgatttcttcagcgacttccatttgggttttcccttggaaaaagcgctttcgcaaaatcattttttcccgttcgttcagtcttctcatgccttctttcagagccagctcctcaatccattgtgtatccttgttgcgctcatcgctgatctggtccatcacgtaaatcggatcgccgccgtcattataaatcggctcaaacagtgaaaccggatcctggatggcgtcaagggcaaacacaatttcttcatggggcacttcaagaactttggcgatttcctctgctgtcggctccctgcttgtctcactgattaaccgctctcttacttgaagcgctttatatgcgatatcgcgaagcgacctcgagacgcggatcggattgttatcccgcaaatatctgcggatttctccgatgatcatcggtacagcgtatgttgaaaacttaacattatggcttaggtcaaaattatcaatggatttcattagtccgatgcagccgacctgaaataagtcatcaacatactctcctctgttgttaaacctctgaatgacgcttaagacaaggcgcagattgccgtttacaagcttttccctcgctgaatcatcgccctcatcctgtaattgcctaaacagctttctcatctcttcattcttgagcaccggtaatttggaggtatccaccccgcaaatttcgactttatttcttgacacgtttttccctcccactaggagctgctgtacaacgttaagtatctcctcgggtgggaaaaatatgcaccgccattttacagaaataaacaatcgactgcggcaatccttgcagcagtaagggctgtcagatggaaaaaattttacaccattttgttaaactcttttctcagtcttttgataatccgcttttcgagccgtgagatataagattgtgaaatccccatcatgtcggctacatctttttgtgttttttcttcttctccgacaagcccgaaacgcagttccataatctgcttttctctttcgtttaattgctcaagcgcttttttcaaaagttttttatccacattggcttcaatgtcttttgtaataatatcatcatctgtgccgagcacatccgaaagcagcagctcgtttccgtcccaatcaatattcagcggttcatcaaaggacacctctgaacggattttattgtttcggcgcaagtacattaaaatttcgttttcgatacatcgcgacgcgtaggtggcgagtttgattttcttttccggattaaaagtgtttaccgctttgatcaaaccgatggtgccgatgctgattaagtcctcgatattgatgccggtattttcgaatttgcgggcaatgtaaacgacaagacgtaagtttctctcaatcagaatggcccgcgccgcctgatccccgctcggcagctttaataagagcacctgctcctcttctttagacaaaggcggcggcagcgcctcgcttcctcctatgtaatacacttcatcgcttttcagtccgagtttcatcagccatttataccacaaatatgtcagacgcagcttaagttttttcatcttcctcccccttctaaatacaacgcgttttgagtatgatgaataacagacttttcgtcaggaaacatgttttacagccttccctgtcagcatcttcggatgaacgattccgtcaaattcaccgtccgcggataatggtttcgtgctgatgccgatcaggcatttttcacaagcgatcatttcgtcttttgttaaaatcgtgacgtaatccggctttaaacagagtaaaaattgattgtcctggccgacgcccctgtatggaatcagcctcagcttatccgcatggcggaacgaatcatcaagctgctctatcacttcaagcggactggcggatttgatgaggtccgtttccttttcactgagaatcggagcgaatttgtcaatgcaaaggatcatgaccggcgttttcgtcagcggatcatacagctgattcccggaatccaccaatcctttcgcgcggattgtctgtccgctgaattccgcctgcaccatgacaagttcatcgtactgaatggacttcgtctcgatgtcttcaattctctttttcgaaaaaaaccatatggctggaaatccgataactacaaacatccagctgatcgggtcgccgaatccggtctggcttgtgaccattacgccttgctgcacaattgattctgtctgcagcagggaatgtacgccgatcattcccccgccgacgagaaaagtcgcgaaataaaaggcgaacaaattttgaaaaaagtatcggaaacgtttaaagccaaaagccgcaagcacgatgactactgaaaacgccatttttcccgccggatgctccacaaagggagaaacaggcgtaaacatcagaagcacaatggctgacccgatgaaaccgccggcggccactcttctttttttcacctggcgttttaaaataaaggcggtcaataaaagcaaaagagaatcaaaacaaaagttcaacagccaaatgacatccagatagattttcacatctgacccctttcctcttttgtcttacatatctgtttctctctcttgtttcataagtataaagcaagctctgtgggaaagtctgtcaattaatgttgagggtaaagtacaatttttaagggataaccgttttatttgtcgagggccgaaagggttgctttcctattgtccgcttcaactaaaaaagcgctgccgtgatctggcagcgctctgtttttactcattgatataaagttttcctttagccgtctgtctcgtttcatttccgtagtcatctctagcgataacgtcaatttttgctccgcttgctttgatggaagaagtcgccgtccagtaaccctcatatcgtcccggagaaatttctctcagcggaagctccgttgcgttttggctccctgcccgggcgtttgtcagaggcagacggataacgaaggaagcgtctaatttctttccgcttgaaaaagcgattttcactgattctccggcttttaattccttatccgctccgggaaccaatccggaaatgacgggagcattgtaattgacatcgattaccgtctttttcgttgttttgttacccgcttcatctgaggccgtgaccttgatctcattgctgccgttttccaagagggttctcgcttgataagaaccgttatttacttcagctttttttccgttcacctttacccattttaaatgggcgtcgtgcacttttccttttacggtcactgtttctttatttgttttatcaccgtttgtcggactgtcaatcgtcacatccggcttatcctcatccagtatgaccgtgacagggcgtgactcatcggttgacccgctgtctgtcacagatgccgccgtcagccgattggcatctttagtgagtgtgacgccggcctggaaattgccgtctgcatctgctttcgtttctgcggcggttttaccgttattggtaagacggacagcggtttttggtgaagccgttcctttcaccgtgattgacttcttgtttgtaaatgaccggtcttcaggcgacgttatttcaggcacagaagcttcgtagtcgaccaaagccctgatcataaagtttccgtctgatttatcggttttagaccagcggccgtcgaggtattgccagtttctgttcgagtacggactgccgtcatcagatgacagggcaggtgtataaggatcgggtttcgtctggcggaacacaagataaaaatcctttccgaccgcgattccttttgagctgagatccactttggtccattctccgtttcgaagcgcttcagcttggaacgggccggcaattttgctgcccggagctccatcagggccggatgcatcatatacttctgcttgaaattcggtacctcccggatcaggccagtctgcgccccaaaatttaaaaaggcctcccgtcagcataccgtgtccttttccgtctttaagcgtcatcttaacggcagatttgctgccggctttaaaatatgacagcgcggcttcttccgtcccgttatcataggcaatttccccttcataaccgatatacggcttaagcttgacgtttttttcagcatcccctttgatgtcaacagaaaattcgctattgtaatagccttttgccgctactttgattgtgtaggagccttcgtacgccttaagcgaatattcccctttatcgtttgtcaccgccggttcaattgcggcatcctcggccacataaagcgcagccccttttaccggttcgcctgttgactgattggtgatggttccttttagcgtgccggacggcatttgctccagtgtaaagtctgcctgtgcggttttgtctgattgaatagaaacttgtttcgaagcggacttaaatccgtaagcctctgctttcagcgtatagcttcccgccttatgcgacaggctgtagcttccgcttgcagggtcggaatatacggatttccccgtctcggcgacactgatttgcgctctgagaggcaggaggtttgtttcacgttttactctttttccgggtgatttcactgccggtttggcctgtttcggactgacagcttttttcttcaggtggccgggaggtgtttgcctattgtgcttactttttttagccgccttgccgagagagctgcttgaaagccggacatcatcgatataccatccgtcttcattcagtacttcgtctgactgcatattaaacatgagctttatgttttggcctttatacgcagataaatctgcctcttcatcgttccatcctgcggagtcaccattgtaaacggccgcctgctcccaatttgattttccttccggaagaacgaacacatacccgtaatcaaaaaattcttcgagcttgtgccagcttttaaattgcaaaaacagccgtcctgtttccggaacttgaatcggaggcatcaccaaattcatattggctgaatctgcataagggccggacagattcgtcgcatacactttatctccggaaaatgcggcgccgggccctgaactcggattcccccattcccattggtcatgtgtcccgtaactggaccagcccgccggctgtgattcaaaatcctctttgtatcccgccgtaatgctcggtttcacgtcagcccggtacgtatcagattctacagaatgacctccgaaatcttttatgatccatttataacttatcttgcttcccgttacatccggaatttccgcctggtatgttccctttttttcatcaccgcttttttgaacggcggctgtcgttttccgctctccttcatcaaactgataggaaaggatgacttcagttacgcttacatcgtcttctgctgtaaccgtcaacggaaggtttgcccctttgtaagccactgagaccggttcatggtgaaagctgggcggattgtgatcttcgcccgcagaagagaccttgccttctacgctcccgattccgtccgttacggcagaaacggcatcaaaagcgttaacgagaccgtggccgtaaccgttattcggtgattccggaaaaacggaatctgtcagtttttccgcggtgcgcgtcaaaacgtcttccatttcatcgaccgtaatagaggcgttcgcctgccttaacaaagccgccgtcgccgccacatgcggcccggccattgaagttccgtcccagccgccttcgtatgttcctccaggaatcgaagaacggatattcactcccggagccgaaatgtccggttttgtttcatgatacggtgaggggccttgaagtgagaaatcagcgagtttcttgtcgatgtcagtcgcacctgtcgcaaatgcttcaggataattggccggatttgcaattgaacccggtcctcccggtgtaaataagtcttcatttcccgcagagaattccggaaaaatccctgccgctctccacgcattcaccatatcgcggtaccactcgtccattcccgaaccgcctgcccaggaattattaacaacatccggcgccatctcgggatgcggcgtgccgtttttatctttaggcgcgagcacccattcaccggcatccaaaatatcggcatcggttcctccgtcatctgaaaatgcttttactgcgatccatttcgcccccggagccacacctatttgatttgagccgtcaggttctgaacccgtcatggtccctgttacatgagtgccgtgttcaagatcatcgtagggagcgtctttatgggacacggcatcataccagttcatttcatgattcggcgctgcgggattttcaggatcgtaaccccggtatttttccttaagcgccggatgatcccactgaactcccgtatcaatggaggcgacaaccgtgccggttccgtcgtatcctgaggcccaggcctgcggcgcatcaatttggctgatattccattcgatgccttcctttgctttgatctctttttgttttttcttcatttgaaaaggagcttttgattgtcgttgagtaagctgacgtttttcattcggaagaactttttctacttcaggaaatgaggcggctttttccattacctctttcgaagcagtgactgccattccgttgacaatataataggaatggatgtgatcagccttacctttctttttttgtttttccaaatatgttttcagattctgctgcgcatcatgagccgccagttttaaagaagaaacgacggctgaccgcttttgatattcggtttttgctgcggaaagcgattgagacttggcgtttttttctgcttctttgaccgcttttttcgtattggctttctctttaaatttgataagaaacgtgactttatcatttttttcaaaaagcttcttgactgaatcggaaatcttatgctgaatgctcttagaggaagaaagatctttggtgaaagaaactgcccccggtgtgctgttcgctccggctgcacccggaaacaacagggaactgacgacaatcgcgcttaaaacggagcctgtccatctgtttctcgtttttttcttcaatcgtatccccccttatttggtaacgccctataaaatgtgtatccctccttcataattggaatcgtttgtcattttcgatgctgtacgttaaatgtagacaatcttccatccagatattgtcacattctgtagaaaaccgtatgaaactaaaaaacaatcaattcgtcataggtataaagttgcttttttcactgtatagattacggggataggaaggaagactgtgcacaaaagaaaaaggacaaaaccatgtggtcttgtccttttttacatcagccgcgtttgttgcggtttcttaaaaatgtaggaatgtctagggcatcatccgccggctgtgatgtatggcggttcaccgtgttttgatgctgtgtttcttctcgtttcggctcacgtttcgcagcgttttggctttgagacttcaatccttggtttaaagtcggacgctgcggttttgagtcatctttttcctgttcgataaaaccggtcgcaataacggtgacgacgatttcatctttcagattttcattgataactgaaccgaaaatcatgttgacatcagggtcagatgcagaagcgacgatgtcggctgcttcctgcacttcgtagaggctcaggtttgtacctcccgtaatgttcatcaaaacaccttgcgctccgtcgattgccgcttccagtaacggactggagatcgcctttttggcggcttcagcagcacggctttcgcccgtagcgatcccgatacccatcaatgctgaacctttgttggacatgatggttttgacatcggcaaagtccaagttgattaaaccaggcgtcgcgatgaggtcagagataccttgcaccccttggcgaagcacattatcagcttcacggaatgcttcaagcatcggtgtgtttttatcgacaatttcaagaatgcggtcattcggaataacgatcagtgtgtcaacggcttctttcattgccgtgataccgcctgcagcctgcagctggcgttttcttccttcaaatgtaaacggtcttgttacgacaccgacagtcaaagcgcctaagtcctttgcgatttgcgcgataaccggtgcggctcccgttccggtaccgcctcccattccggctgtaacgaacaccatgtcagcgcctttcagcgcttcttcgatttgttccttactttcttcagcggcttttttgccgacttccggattcgctcccgctccgagaccgcgggtcagcttttccccgatctgcattttcacttccgcttttgacaggttaagagcttgcgcgtccgtgttcaccgcaatgtactctacaccctgtacttcattttcaatcattcggttgaccgcgttattaccgccgcctcctactccgattactttaattgatgctaagccgtctatgtttgtttcgaaatccaacatgctaaatcctcctaatctgccgaatgactatcaatctattcccaaaacatgcttaatagttttttcattttgctcggtttgttgtgttcggcttgtgttttttgttttgcttttggacgctgctgcgcctctggccgctgatgatgttcttcttcgtgagagaccgcgatttcctgcacggcttcttccggcatatgaaagcctatttttcttccctgaattctggcatttcggcaggcaaattgtatcaagccgacacccgtcatatactgagggtctcttacaccgatataattcgggcttgcgacccttacattgtgcctcagcacttcctgtgccaatgaaagcactccgggcattgcggcctgtccgccggtcagcacaaagccgccgggcagatctgtaattcccatatgctcaatttcggctgcggcaatctcaagaatctcttccactcttgcttcaataatattggcaatttcctgctgtgtaaaagattgcttttgattcgttcctatgacggtgacttcaaatacttcatcttctgaagcctcatcgtagaatgcatgtccgaattgtttttttactctttcagcctcttcggtggaagtgcgcaatccgatcgatacatctttcgtgatgttttcgcctccgagcggaatgacggctgtctccttcaggtgcccctgttcaaataccgccaccgtcgtcgagccgccgccgatatcaatcatggcgactccgaggtttttttcgtcttttgacaaagccgccgaaccggccgcaagcggctgcaggcagatatcagtaatttcaacgcccgctctctccacacagcgaagtaaattatgtaagatcgttttggagccggtaatcagcgtgccctctacttccaagcgcacgccgagcatttttttcggatcggtaatttcgtctcttccgtcaacgataaactgtttaggaacgacgtctacgatcagctgctcatgcggaactgacacgacctgtgccgcttccattaccctgcggacgtcttcaacgtgaatttctttgttttcactggaaacagcgacaacgccgttcgtatcttgaatatgaatataatttccattaacgccgacaatggcttttttcagcggaaaacctaccattctttcagcttggtcaaacgcttttcttatagaatgaacggtttcatctatatcaacgattgagccttttttcaacccttcagacggcacatttcccactccgataatgttaagggaatcatctgtcatttctccgacgatcacttttgtattggacgtaccgatgtcaagactgacgtaaagttcattgttgttcattctatggcacctcctcacatttcgatcaaattctattctattatttgcggaacaacaatacaatgaatgtggctttacaagtgtgtaacaaaaacaacagcatcaacaaattcttatctgatttctcacaatttatgtttaatgaaactattcgttatattctatgtatatcctcttttatatcgcattttttttattttttttagagacggcccaccttaccgtaagatttcttgtcacggtgtcatactgtgcaatccagatgcaaatatacccgctttcccttagtctacactaagatggacctccagaaaagctatagatattgccagaaacatccgaaaaaagaagaaacaggaggaaaattccaaatgtaatgctcactgcagaagacacgcccattgcattgagaattttccgcttgtccggcagccatatcccgcgcaaaaacaaacatagtcataatgattccgctatcggttatatcggctgccccgctgattgtaatagattcttttgaaccgcctttaaattagttctttagaactattaatcattttcttttttcttgccggatttacctttgttaaattcttcaaaatacgtagcgacttctaagtggataatcccctttttcccgccgtccagctgggaaacgatagaaggataggtcttcatccggccggcaaacgttttaatagaagcggtaactacatacccgtcgttcatatacagcttgatccggtcctgatccatttttaccggtgtataatagatttcagaaatcgactgcttaagcgaaccggaaagcttatcaagctgctccgccattttgacccgctttttcgcgtttgtccagtcaaccaaaatcgggcccgcgtcatccggcgtgacttcgttcggcagcacagtgccgttttcgagcacttcataatacacatcatgtcgctgcagatacgcgatcgtcttgtattcttcaatgtgaatgctgactttgttaggaaatacttttgaaagttccgcctttttcaccagcttattctgctcaatcttttcttctgtttgtttcttgttcagactccagaactcggtttgtccgttatgtatatcagaaagcgcgttgatctcttttacagacacgttttcgtttccggaaacggtgacagaagacactttgctgatcggcatctgcaagtacacgatgattagcaccatcataaaaaagagcacaatgaatgaaatcagccggcggtttgctttttgtttccgctgctctttgattttcggaatccgctcttcaatatttacgattttttctctttcatgatttgggttcactgcctgtccacctcactaagaatgaaacagcttgacattcgtctgattgaaaaacaaacggcatgctgtgatgccgtttgacatttgttaaaagtatatcacatgagctcatgtaatcagagaaccttttaacgattccctccgatgatttcaacttctgtatgcatgtcaacatcatactgctcacggattgtctttttcacatattcaatcagatcgagaacgtccttggcagtcgctccgccagcattgacgataaaattcccgtgcatttcggacactttcgctccgccgatctgatgtccttttaatcccgctttttcaacgaggtttccggcatgattcggcagcggatttctgaatatgcttccggcgcatgggctcgaatacggctgcgtattttttctgtaatctttgttctgctgcatttgcgccgtaatggcttcccgttccttttgctcaagctgaagaactgcctcgagacagacgccgggacgttttttctgcaaaacagacgttctgtagctgaaatccatctcttcgtttgtcagccattcgattgtgccgtcttcaaataagatacgggctttcacaagaatctcactcatatcagatccgtgcgccccggcattcatatagacggctccgccgattgatccgggaatgcccgctgcaaattcgagaccggacattccttttttactcatggaagtcgcaagccggacgaccgaatagccgcctccgaccgtcacctgatcaccgtcaatctccaaatgatccagacccgcgcccagtttgatgacaactcctcttatgccttcatcaagcacgagcagatttgaaccgcggccgataaccgtccatggcagatcatgtttcttcacaatatccataatatctttgaccgcttccacacggttggggatgatcaaaatgtccgccggaccgccgattttcatcgttgtatggttcgcgagcggttcttgttccagcactttgccgacttcgcggtctcttaattcctgaattacgttctccatcataaacctccgcattccatttgctctatttttttatgtcttccatgatactgtacagtctggctgccgcatccggaacaccgagtgattttgtccgctcactcatgtcttttaaggtttcttcattcatgacgattttgtccagcgcagcgatcagtttttctccgctgagctcagtttccttcagtacgattgcagcgtcatgctggctgagcgccttcgcattgacttcctggtgattggctgtcacatacgggctcggaataagcacgctcggaatgccgagagcggtgatctccgcaatcgtcgtcgctccggctcttgccacaatgacatcaatggattgtaagtactccggcatttggtgcaaaaacggttttgtcaccatattatcagcggcttttccgcctttcagctcagccgttaccttctcgtaatgcacttccccggtaatataaaggacttggtaaggtctcgttttcaattcttcctgcatatctataacggcacggttaatgggagccgcgcctctgcttccgccgaaaatgagcaccgttttttgattgtctttcagcccgaactcagttaaagagcggcctgtcttaattgagacgacttcagaggctctcgggtttcccgtaaacacaactttttcagcaggaaaatgcgattttgcctcttcaaagcaaattgccaccttattaacatatttcgagagaaacttatttgtgatgccgggcaggctgttttgctcatgaatgatcgtcggaattcccatctttgccgccgcgtatacgaccggaccgcatacatagccgcctgtaccgataacggcatctggtttaaactcttttaaatatgatttgcttttcttcacgccttttaagaagcgcatgacggtttttacattttcaaaagaaagttttcgtttgaaacctgtaatttcaatggcgcgaaacggaatattttcccgttcaacaatttttttctcaagaccgttctctgttccgatatacaaaaattccacatccggatgccggcgctgaacttctttaataaaggccagggccggataaatatgtcctccggttccgcctccgcttactgcaatacgcattcgtatgtcccccttaatcacatagcgataaccctgttttttaggacagggttattgatgttgtctgtttttttatagataacgaataaatcatgagtgatgaggcaagatacagatcaatacctcgagtaccggctgacatttaaaagcacgccgaccgctgcgagcatcagcgtcagtgatgagcctccgtagcttaaaaacggcagcgtaattcctgttaccgggatcagccccgtcacaacgccgatattaatcatgacttgaatagctatcatagaaataataccgatggcgacaaagcttccgtataaatccggcgcgccgagggcaatcctgacgccccgccataataaaatactgaacagcagcaatatgagcgaaccgccgataaagccgagttcctcagataaaatagcaaaaatgaaatcggtttgcggctccggcaggtaaaaaaacttttgccggctttgacccagccccattccgaacagtccgcccggacctacggcatagagcgactgaatgatctgaaatccgcttccaagcggatcctcccacgggtttaagtaagaggtaatccgtttaatccgataaggagcggacagaactagcgccgcaaatccgcttaaaccgatgagtccgaggaacgcaaaatgagcgattcgcgcaccggaaacaaaaatcatcacgatgcacgtgcccaccattaccgtccccgttcccagatccggctggcacataataataataaatgcagaaaacacgattccgagcgcgggaacgaatccgcgtctgaatgacgtaatattcttctgtttttcagaaagaaatttagccagaaacgcaatcatcgcgagtttcataaactccgaaggctgaatgctgaacgctcccactccgatccagcttcttgaaccgttccgcaccattccgactcccggaatcagcacaagcacaagcagaaaaaaacaaatgatcagaagcagcttcgaccatgtgcgccatgtccaataatccacattcataatgaaaaacatggcaatgacgccgattcccgcaaacagcagctgccgtttcgcgaagaaaaacgagtcgtcaaatttataatccgcccataccgcacttgcactgtagaccataattaatcctattgttaaaagcaataacgtaatgataactaataacaaatcaggcgctgtttttttagtagtcaaagcaatcgacaccccaagcataagtcatttagggctgccgatgaacagagacaagcccttacttaagcatatgcacggcatctataaacatgtcaccgcgttcttcaaatgttttgaactgatcccagcttgcacacgcgggtgacaagaggatgacgtctccttcatttgagagcgcaaacgccgcagatactgcttgttcaacattatcgacacgtttgacatgttgtattcccagctcattgcccagtttttctatcttcggcgctgtctgtccgaacgtcaggaccgctttgacattgtccatatacggtttcaaatcgtcaaaaccgttgccgcggtccagtccgcctgcaagcagaataaccggagctttgaacgcggagagcgctttgcttgtggccaaaatattcgtcgctttgctgtcattataaaatttacgattctggatcgctgttacatactgcagacggtgtttgacaccggtaaagcttgtcagcaccttctgaatcgctttattagacgcgcccgccgttttggccgcggctacagcggctaaaatattttctagattgtgcgcgcccggcagtacgatgtcatcaacaggcagaatcgcttcatcgccgaacatcagcattccgtctttaatgaatgcgccgcttgacagttcctggtgaactgaaaacggaacggtgccggcttttccgctttcggcaagccgcacgactgtttcatcgctttgattcacgatggccgtatcactctcaagctgatgaagatacacgttctgcttggctttttcatagttttcacggctgtgatggtaatccaaatgagcgtcgaacacatttaaaatcaggccgatttcaggtctgaacgcatgagtccccataagctggaacgaagaaagctctgtgacgatccattcatcaccgtcagcatggtaagccacttcactggcgacagtgccgatattccctgcgatcagcgcctttatcgaatcagctttcagcatttcataaatcagggtcgtcgttgttgttttcccgtttgaacctgtaatgccgatgaattttgcattggtgatataatacgcaagctcgatttccgtccagaccgggatgcctcttctttgcgcttcctccaccatgatattttcatacgggattccgggatttttgatcagaatggtaatgtgatgctgatcaaaaagtgacgtcggatgctcaccgcagatgacttcaattcctctttctgcaagcctttgggcaggttcgttctcttcaaaggctttttgatcattcacgacgacgttaatgcctttttcatgaagaatcgacgcagccgcatatccgcttttcgccagtccgaggaccagaaagttttgtttttgcaaaaaaagttcgttttccacttataaccacacctcgatgtaaattcctaaaacggcaagcagcagtcccgcagtccagaatgtgacgacaactctccattcagaccatccgaccaattcgtaatggtggtgaagcggactcatcttaaagattcgttttcctgtcgttttaaagctgatgacttgtaagataacagataaggtctcaataacaaatactccgccgataatgacgagcagaatttcaagcttcgttaaaatggcaacggtcacgatcgctcctccgagcgcaagcgaaccggtatcccccataaataccttggcgggatgggcgttgaatacaagaaaaccgagaacggcgccgacaacggcaaccgagaaaatcgcaacgtcatattgtgactggttccacgcaaggatggcgaaagcgccgaatgcgatagccgcggtaccggacaagagaccgtccagaccgtctgtcaggttgacggcatttgaacctccgacaagcataaagagaacaaggataaagtatccccagccaagatcgattgacagatgtgtgcccggcaccctgatgccggttgaaaaatggcaataatgatatactccgtaaaatacaatggcaataatgatctggccgatcaatttctgcttcgacgtcaatccgagattccgtttcattactactttaatgtagtcatccagaaagccgagcaggccgtatccgatcgtgacaaacagcagaagaaacatttccgcgctcagatgcgaaaatttctgcgtcatgacaatcgccgtaatggcgatggatacaataatcatgaccccgcccatcgtcggcgtccctgattttttcatatgtgatttcggcccctcttccctgatactttggccgaattttaaacgtcttaaaaacgggataagaatcggagatatcagaacactgattaaaaatcccattattattgtaaataaaatcacttgctcaagcattgctcttttctcctcccgtttcgttcaaacgacatacgtatttatcatattcacattgtgtccccgtaattctattcatttccctcattctaacactctttcctgttttactttttattcagctcaacaatagctcttcccgctacttcggcgtcatcaaagtcgaatgtttcattgccgatctgctgataggtttcatgccctttcccggcaatcagaaccacatctccctttttcgcgttggcaatggcaaaaaagatagcctgctcgcggtttgcgatactgtgatagtaggtgccttctacccctctttccatatctcttaatatggccagcgggtcctcgcttctcgggttatctgaagtgaaaatcggttcgtcggcaatccgcaccgcaatttccgccattttcgggcgtttcgttttgtcccggtctccgccgcatccgacgacgacgaaaagcttgccctctgtcatgtctttgcatgtattcagaacgttttccagactgtcaggggtgtgcgcgtaatcgacgaccacaggaaacggctgattatgattcaccagttcaaaccggcctctgacaccttgcagctcttcaagagcgcttgtgatcgtatcaaacggcagtcccgctgcgatcgctgtcgccgctgcagccagtacgttatacacgttgaagcggccgacgagtgaaactgtgacctgctttgttccttttggcgtaacaagttcaaagcttgtgccttgcgcagagatcgcgatttgtttcgccatgacatcggcatcattctcgattccgtatgtaaggatgtgcgccgccgtcactttttcaaaataagcactggctttgtcatctgcgtttaaaacggcccgcttcggcttttcatggttaaaggagccgcccagctgggaaaacaggaggcttttagcctgtctgtagtcttccatcgtcttgtgatagtctaaatggtcctgcgtcaggttcgtgaatacggcgatatcataatcgcagccgtgaaccctgccgagtgacagagcgtgagaagacacttccataatagctgtgtcaacatgctcatcattcattttcttgaacgttttttgcagtgtgacgctttcgggcgttgtatttttgaccgggaatgtctcatccccgattttaatgtacatcgttccgattaaaccggtctgtcttcccgcttttttgaaaatctcatcaaccatgtgcgtcgttgatgttttgccgtttgttccggtgatgccgataagctgaagctgctttgtcggctgcccgtaaaacgcgtcagaaagaacgctgagcgcccgctgtgaccggcggacgataatgacaggaacatcgacgtcaagctctttctcggcaacgatggccgccgcgccgttttctgcggctttttgggcgaaatcatgtccgtctaccgtatacccttttatacacacaaaaagactcccttttctcacttccctggagtccatctcaattgaagttatgtcagggtcatgaaagtcattttgaacaggttcggccattaaatatgtaagcagctttgtaagtttcattgtatcaaacctctcagaaattctattcattcttttatcatgataaccgtttataaaagtcagaatggcttttaaacatacagttcatattttagcgtaaataaaaggatacatccagttaatcttaaaagttatcttctttttttctctttatgataagaggcagccgaaaacaatcggctgcctcaaaaagactcattcttcactcaagtaaacacggatctttgagccttcttttactttcgttccggctgcaggtgattgtttcacaattttgcttccttttcctgaggagtcaatattcaaattgacaagcagcgactcaagatcagagacagacatccctacaacattcggaacctctattgtttttgtgtcgttccattgatattttttctcgatttgattttttcgcggtttgacgccgagctcaggcagactgtctctcatcatatttccgacaatcggcgcggcgacggttcccccgaattgaatcgtgcctttcggattatcaaccgcgacatacacgacaaggctcgggtcatcagccggcgcaaagccgataaaggagacgatatggttgttttcgagatatttgccgtctttgaccttttgtgcggtacctgtttttccgccgacgcgatatccttccacaaaggcattccgccccgttccctgagcgacgacgctttctaaagcatatctgatctgctttgacgtttcctgggaaataacttgccttttcgcaatcggtgattgtttcttaacagtttttttcgtaacgggatcaacccactctttggcgataaacggagtataaagcgttccgccgtttattgctgcggaaacggctgccacctgctgaatcggcgtgacggaaaccccttgtccgaaagcggttgtcgcctgttcgaccgggccgactctgtcaagcgggaataagatccccgttccttccccttgcagatcaatgcctgttttctttccaaagccgaagtccttaatatattgaaacagcttttgttttccgagccgttccccgagctgtacaaacccggggttgcaggaattttgaacgacttcaagataagattgcgaaccgtggccgccctttttccagcatcggaggcgagcgccgtcaacctcggcaaatcctttgtcataaaagtggtctctttgcaagtttactttttgctcttggagcgccgccgcaagcgtaataatcttaaaggtcgaacccggttcatatgtgctccataccggcaggttccggttgtaaacggacggatccaccgattgatagtcagccggatcaaaatcaggacggcttgacatgccgagcacttccccgtttttcggattcattgcgaccgcaatcattccgtccgggttatatttcgccgctgcattgtcgagctccctttctataatcgtctgaaccttggcgtcaatcgtcaatttcatatcaagtccgtctttcggaggggtgtaatcatccgcttcatcaggcattttcttccccttggcatccgtataaaatttcacagatccctttacaccttttaagtcatcatcataataagcctccaatccgagaaggccctggttatcaataccggcaaaaccgagaacatgggacaaaaagcttccgtacggataatggcggatgctgtcttcagccacataaaccccttttaagtcgagcgctttgatttctttcgcttttttattggaaattttccgcccctcgggtgagattttttctatggaggttttcttagtaatgtgtttgtagaccttctcttccgacatatttaaaactgacgcgagaagtttgcccgtttttatgggattttggatctggcgcggtacgacaaagacggtcggcgcgcttttattagtagccagcttcacgccgtttcggtcaaggatctctccccgctcaggctcaaacggcaaattccggctccaggaatccttagccagtgaagtcagcttttctcccatcacaaattggacatagcctaatctgctgtcaatgatcaaaaaaatgattacgccaaaaagcaaaaccagtaataaacgttttcgaaccgttacatttgaaacgcgcaagggaccgtccactccttatttaggcttgtttcaatttatgcctcagcttggacacatagaacggcggcgcataaaaaagaagcccgcgggcatccgcggacttctctgtcccgttaatcaggatttttaaatttcaccttgatcacggtattttctttcagttctttgccttttttcacactttggcttgaagcgtaaccttcaccgctcacatcaatgtgaatgcctgatactttgctgaattgaagcacttcccgtctcgaccatccggacatatccggcatcgtcatctttccgtctgtttttaagaagattttctgattggtgatcacatcttctccggctgtcggatactgctcttttacggcaacatcgctgccgatgacaatcggtgtgagatgttcatttttcgcttccttctcagcgctcttgaccgtcttatctgtcaggtcaggcatcttttggcttttcgtttcttcctgaccggaatctgttttttccgtcggttcgatattcatgtagtggaggctgtttttcatcgtcgggttaaagatttccgcgacaggatcagagctgctttgacccgcttttaattgcggctgctgcacggctacatagatgacgagcttaggatcatttttcggcgccatgcccatgaatgaaaacacatagttgctcgttccccttaaatatccgcccgtcccggcaatttgtgcggttcccgttttacccgcgacgtcaaatccttcaattttataaggttttcccgttccgatgtctgacgtcacgacttctccgagcagattccggacttttttcgccgtatcggccgaaatcggtgtgcctacttgctctggctttgtctgcttgacgacttttttcgtatcggggtcgacaatatgatcaatgacataaggtttcatcattttgccgttattggcaatcgccgtgacggcctgaagctgctggatcggcgttatcgccgatgcttggccgtaagccgtagacgctttgtcaaaatcatatttgtagttaattttacttgatacttcaccgggcagatcaacccctgttttttgatagagcccgaatttgtgcaggtactcattaaaccggtcaaaccccagtttttcgttggccagtttggcgaatgcaacatttgatgacctcataaggccgtcatggaagcttgtcatgccccagccggcgccgtcgttccaatctttaacaggtttgcctcccactttatatgttcctgatttatatttctcgtttgcggaaaacacattttcctgaatcgccgcggcaagcgtaaagatcttcatcgtcgatcccggttcatatgcgtacgacactaagtcgttgtaataattggtgacgtttctgatattcgggtcgaaactcggacgctgccccatcgcaagcactttgcctgttttcggttctacgacagccgccataatttttttcggtttatatttttccgctactttcgtcatgctgtcttctaaaaaggtttgaattttctgatcaatggttaaatatacattgtcaccgtttttaggtgcggtgattttttcattgctgttcggaagtttccagccggatttatcactttcgtaagtgacggatccgtcgcgttccgtcagatagttattcagtattttttcaagccctaaagagccttgtatctcgtttgttttttcattcacatcggcatagccgagaacatttgacaaaaatacaccgttcggatagtagcgcttcgtatctcttaagaaagaaatacccggaagattcattttttcgatcttttgttttttcgcataagagatatcgcggcctgctgaaccgaattccacctgcttcgcgccatccctgtttaagatgtccagaatcttgcttttatcaagattgataacggtcgccagtttttccgccgttttctctttgtctttgacatgctgaggatgcttcggatcactcgtcatttttttatcaagtacggcaatgagcttatatgtcgccgtgtcctctgcaagcactttgccgttccggtcaagaatagagccgcggctcgcttctatcgtccgctttttttcgtgctgctcggtcgcttttgttgcaagttctacaccgtttgctttaccggttaattgaatgtacgccattctcccgagaatgacaaagaaaaagagagcgaaacaaatactgagtatcgctgctcctctgttcataaacttattttttttcggcatgggttatcattcctgtatgtttttcacttttttatctttcagattcaaaccgtgctttttggcgatatccatcaggcgctgcggctggcttaagtcagcagccgtcttttcgagatcaccgatctgcttattcttctcagatactttctcctccagtttttgcacctcaatattggattggtacgccgcgtatgcctttgatacgataaacattgatgtggagagaacggcaatggcaaacaggacgagcagcaccttttccccgagtgtaatggaagccctctttttgacaatcacctttttttcgggacttatcactggccgttgttgtttttcctgctggtaagctaagttgctcataggctgatgacctcctttaatgttgtcatttgctgcccgttattttcgtttctccgcaatgcggagcttcgctgaccgggcgcggttattttcttcaagctcctcttttgatgccgtaatgggctttctcgtaatcagttttaattccggttcaaattcttccggtatcacgggaagacccggaggcagttcgggaagtgatgatttttccttgaatgtcgtcttgcacattctgtcttccagcgagtgaaaagtgatcacagacacccttccgcccggcttcagcacctctatcgcttgcaagagggcctcttcaaatacttgaagctcgtcgtttacggcgattcgaatggcttggaaaacacgtttggccggatgacctccgcttcttctcgccggagccggtatcgcgtcctttattagatcgaccagttggccggttgtttgaataggcgatttttctctagcctcttcaatttttcgggcgatctgcttgctgaatttttcttctccgtatctaaagaaaatcctcacaaggtcctcataccgccattcatttacgacttctttcgccgaaagggcggccgactggtccatcctcatgtccagcggtgcgtcatgatgatagctgaatccccgttccggtgtatcaagctgcggagaggatactcctaaatcaaataaaattccgtcgacactcgtaatgccgtgttcatgtaaacactcttttaaataacgaaagttgcttttcacaagaataagctgtcctttgtattcggacaatgttttctttgcgttttcaagtgctgtgtcatcttggtcaaaggcgatcaagcgtcctttttccgataattgctgcaataaatatgtactgtgcccggcgccgccaagggtgcagtccacataggttccgtccggtttgatatttaaaccgtcgacggtttcacgaagaagtactgtcttatgctgaaacatttgtgtcggtcccacctttataaggaatgaattgaattgtcagttgttgttgtgatgcacgaagatccattatatatcaaatccaatcatgttttcagcaatttcagcgaatgaatcttcttgctcttctgtgtattgttcccatattaccttactccacaattcaattcgattggaaaccccgatgacaacacattctttttccagttttgcgtaattcagaagagatgacgcaatattaacccttccctgcttgtccagttcgcattcggtcgcaccggaaaaaaagaatcgggtaaatgcgcgggcgtcttttttggtgagcggcagagccttcagcttttcttcaatcagcttccattcattcatcggatagccgaaaaggcattggtccagtcctctggtcagcacgaactgctcaccgaggccttctctgaattttgcgggtacgatcatgcggccctttgcatcaacagtatgccggtattcacccataaacatgataaggacccccactttctcccctaaactcaccactatccgccacttctctccacaacctcattttacactgtttacacataaaaaaaaaccctgaactattcagggttctttaaaactttatttcaaagtttgacaatctgatgttggttttgaaaagaaaatggcagatgtttgaaggttgtgaagaattttggaccgtagcggttcagataatacatcacattccaaatccgttcctgcggagcgccgagcggtctgatgctgttttggattctttcatagtcacgcagcacaaagccttctttttcttcaattcttttcgttaccgtccgttctaaaaacaagagctgatcttgaatgaaggcggcattcttctgtaagagcggctcaaggcttgaatcgaccttcagcgcttcgtcccttacgcgtttatggacagcttcaatctgcgacttcgcctgttccattacagaagaaaactcttccggaatctgctcttcaaaataagtgtctttcaggtgtccggtgccgtgttcgatcgcttcctgaagcgggatattccgttctgaaagcttcttttcaatatggcgctcaagaatcgtaatgttcagtctcggcattaccggggtcatgcgaaggcccattaataagaaagcctgcttcagctcaccccaataattgatctcccccggccccgcgataaacgccagagtcggaatgagaaactcctgcataagcggccttgtcacaacgttattgctgaaacattccggtttttcttccatatgggtatgaagctcgtcgttcgtccacttcaggtcaagctccttaatgacaaaaacgccgttgtctttttcaattaagaaacgctctccctcatgttcgtaaaacagattggcctgatctttgtccgattcaataatcgggtgataaccggcttcccgcataagactctgctggtatgacacggctttggcaagctcatgattgtgttttaaaatctgctgaaacatacccgtttccagctttttaatccccggatctcccgaattcatcagaataaggccttcttcttgaaacaagtcggcgatcaacagttcaaaaaagtccgtgaatgtctctgatgagcgtaaacatcgcttcacgttttgaaggagtgtgtttgtgtgatccgtttcctcaaaagcagcgaacacttcatcaatccaagccgcgcatttttcctgatcaagctcggttttagccgccgatgtttttttccagtacgactgcggcagtttctgtttcaccggacctttattctctgctgacgtatgcacaaaattgatttcttccagatcgtgatcttcacccgccacccagaaaatcggaacaacaggaatctgtaacgcctcttcctgctgtctggcaagtacgataatggagataattttatgtatggtgtaaagaggccccgttaaaagaccggcctgctggccgcctacaactgctgcgctttttggatctctcagtttttcgatggaggcctgcatggcggcggagtgaaatttttcgtgataggaggataaataatccgctaattcctctctggcaaacggccgcgaagacaagtcatgaagccgcttttgccatacgtcctctgaatgaatatcataatcaaaaaatgaagacatgttttctccatctatatagtgctgcacaaacttattttgacttttgatggaaagttcagttagctgcatctgtctggaacttcctttctccaataaatagttaggtttccgaaatgagtatagcatgttaccggaaaacctcaaaagactttgtttcagtttctttctaacgcttttatgctgcggtgtaaaaacgtgagatgaacggccggcaatccgcggctttccgcttcttttacaaggtagccgataatcgcatcggcctctgtccgcctgcctgccatgatatcgacgaacatggaagaatgatttttttccgtcagtctgcaaacttcgcaaaccttgttccacgctttttctctatcggcgaggccaagtattgtctccgcttcttcaaacacgtttctcatatattttttgtaagcgtcatttgttaccagctctccgtttttcacgcgcagcaatgcagttaacgggttaatgcatacatttatgatcagttttcccgttaacagccgataccagtcgttttcatcatatacgggaaaatcccggtgcatgccggaaaagatgcttttgagcgtttccggccgggaagcgctgaatacactccatcttacggctcccgctcccgtatgttcaacggcatgatctgaaatcttttttgctccgtgctcaacagtgccggcataaagcgaatgatccgtatgccaatctttaatgtcgtgtatgtgtcccatgccgttttgcaaaaacagcacattcgtcccttttatcgtctcaagatcccccaacacagcacttagctggtgctgtttaacggctgcgattaagaggtcgaatccggaagtgatgcctgtttgcgctctgcatgccgccgtacattctattccgtctttcaaaagccgtataccgcctgagttaatcgcatcagcctgctccgtccgccgcgtaatgaccgttacctgatggcgggacgataagtagtaagcacataaaaggcctaccgctccgccgccgataattccgattttcacactgtcacaccctatatctgcatttttccatattatcatagcagaagccgccgcaaattacttcaatttcgttttgagcaaaaagactggcaagcatattatagttggaattttcaattaaagcgtttacaataatggtagaacacaacaaagggggagtttgtgttgaaaatagagcggctgctcatcaactttaagacactcgaagaatttaaaaggtttaaggaatacgggatgcaggagctgtcgatgcttgaagatcttcaggataatatcattgaaaatgacagcacctcgcctttttacgggatttacttcggggataaactagtggcgagaatgagtttatatcaggtaaacggaggcgcgaatccgtattttgatcagcgtcaggactttttggaactttggaagcttgaggttcttccgggctatcaaaacaacggatacggaaaagcgcttgttgattttgcaaaatccttcagaatgccgatcaggacaaattcacgcatgaaatcagcagatttctgggataagatgaattttgagccggttaaatatgatatggcgcgtgataaaggagaaaatccttatatctggcatcccgatatggacggtgaaatgacagccggagaaacggcataataaaaaaaccggccgggccgccgcccccaggccggttcattttacaggctctgcgccgattttctgtcgtcttcttttgaattgaccatccttctcgctctgtccataatgtcaattagcgctttataatcttcttccgtcatctccagcttgtttctcaagctttcattttcctcacgcagatcctcgacttctttttgcagcgcggtcagctgttctgtgagtttttctttttcatgacgcacatccgctgcggctggcgactctttaaattgctgcagaaacaaaatgacatcatcaatagacagctctttttctccttccgccctgcggatcggaggctgcttgacggttcccggcagattggcggaatggaccccgatctgctttcttaattccttccgctgttttttcgccagttctatccctgactgatattgttttctgacataagaattccatctgaacccgcaggcggcagccgttctcgtcagcgctctgccgacttcttcaaaagcggaaagctgggtaccgccttcccgaatatgcctgagcaccacttcggccagcagcaaatcttcatcttgcgtccacgcgtcttgtctcgttatcgtcaatcgtatctccctccatatttgctcatttacctcatacatatgccgctgatagattagatagactactggggctcacaattttttcggcggaagcagaccggaggggcaaaaaaaaaaagaaaagcgcaggaaccgagattcccgcgcttttcttcatacattaattgcttttaacatttatgtctttgccgttgtatgatccgcatgctttacatacacggtgagacaatttcatctctccgcatgacgggcattctgtcataccaggtacatttagtttgaaatgtgtacggcgcaatctttttttcattttagaagttcttctaaaaggtacagccattattcccacctccttaaagagttaagattcatcatcttgtgttaagagctttttcagatctgcaagtctggggtcgatttgatttttcttgtcttcctcagaaatcacttgccaatccttccccacttggggagcggctccttctttttgttcagtttcacaaaagacttgcataggaatttctaaaagaatctcttcttttatgatcggagttaagtcgatgatatcgtcttcagcaatatgaacgtcctcatcttctatatcatccgacttatgaaatctaaacagttcttttgtcgcgattgtaaatggatacggcacatcaactaaagttcttgagcacggcaaaaccatttcgcctgaaatcgtaaagtcaaacgaaacttgcttggattcaatctccgcacggcccttcacccggacaggagaaatgcggcggatgtcagaattcaattttgtcagctcatttaactcaactgtttcatcaaattcaaagctctttttcgccatttgatgaagctgataaatcgtccatttcatttgtatcacctcaggaaagcaacaaacatgattatagcttttcagaatgtttttgtcaatattttttctttacagcataatgccgccgtcatgcaatcgttgacagccggataggctatgcatacactaaacgaaacggactaaaatatgcacttcatttgcaaatgtaccacacgaagcaaaacatagcaagaaaggcgggacaaatatgaaagcagtcggcctggttgttgaatataatccctttcataacggacaccgctatcatgcggaacaagcaaaaatcaaaacggacagcagcgtcgcggcggcggtgatgagcggcccttttttgcagcgcggggaaccggccgccgtctcaaagtgggcccggacaaaaatggcgctggaaaacggcgtggatatcgtcattgagctcccttatatatatgccgtacaaaaagcggaattattcgcgcgcggcagcgtttcgcttcttcatcatttaggatgcagcagcttgtttttcggcagcgaaaacgggcggatcgaagcctttattgaagcgtctgaagcgttcagccgaaaggaagatgactgcagcctgattctaaaagaggagctaaaaaagggtctcagctatccggccgccgcctcaaaagctttttcacacatattcaaagggcgggacatgctcgatttgtccaagccgaacaatattctcggttttcactacgttagagcgatgcacacctccggttccgctatgaagccttatacgacagccagaatcgcttcccagtatcacgacgccgagcttcccggagataacagccggatagccagcgcaacaagcatccggaaagcgctgatagaaaaaggaacggcggccgcaagaagctttctcccggaagcgtctgcgcgtgagctggaggcatacagaaattcatacggaatatggcacagcacggaagactatttttcatatgtaaaatacagcctcagcactctttccgctgaagaattgagccgaatctatgaagtggaagaaggccttgagcacagaattctgcgcaccatcagacaagcccgatcctatcgcgaaatgatggaacgattgaaaacaaaacgatacacgtggacgaggctgcagcggatgaatacgcacattctgacacggacgaaaaaggaagacatgcatcggctcttacagccttcaagcgctccttatatccgtcttctcggaatgacgaaaaaaggacaggcgtacctgtcagcaaagaaaaaaaagcttaccgcacctctcgtcagcaagctctcttctttctctcatcccgctctggatctggacatactggcgggacgggtttacagcctgccgataaacgaacctgagcgcacattgtttgagaaacaggaattttcacaagcgccgatccgctatgatgaagacgaaaagcgttttttgaatgcgtaaaaaaaagcacctgactgtatcaggtgctttttactttcagctgatccaaatagtcaagtgcgtcctgcatggtgtcgacagggacgatcttcatatcggacttgattgctttcgccgtttttaccgcatttttgtaatcagaattttcagctccgttttgattcggcgcaaagaaaatatcttttcccgctttgtctgcggcgacgactttctgatcgattccgccgatcggtccgactttgccgtccacgtcgattgtccccgttccggctatattatagccttttgtttcgtcaggttttgtcagctggttgtaaatttctaaagacatcatgagacccgcagaaggcccgccgatgttttcaatgctgaaatgaagatccggcttcactttcacgttccggtccgtatataatgcgacgccgattcccgctcttttcgggtcgtccgggaatgatttcagcacaatgtcaacggtcttttctttcgtgtcccgttcaatgtgaaacgttactttttcccccgcttttttgctgctgatataatcaatcagcttttcagcggattcgtatgttttcccgtccgcgctgatgattttatcaccgacctctatttttccttttgccggcatgtcagagacgactgagctggcataaatgccgttaaatgagtatttcacctgtctcccggctttttgataagcggcaatgaccgcgttttcttgggagcttttcatcatttgcagctggcgcttcatataatccgagtccgattcgccctcttcttttatgctttcatcagagacgatttcatcgtaaggatgcactttcgcccaaagatatgtatacggattggcggggcctactttgacagtcatcaaggaaaggcttcctttttcaggatagcctccgtccaccttaatcagcggtctcagctctgatgcttctcccggctgtgtgatgtaatacggaagcttaataaatgtaacagcgattaataagatcaggatgataaacacccagcgaaaatgctttgctttcatatgagctagccctcccagttctctatttcttgtttaatccggccgatcatccggtctgcggcttcttcgcccgctgtgatcatatgatcaatgttggcaaaagaacttgagctgaatgattcaagagaagggcggatcatgacgtctgcggcaatggtctggtgacggaccaattcattttgcagtatatccatactttgcatgattacatcaaaaatatgtgccgccttttccgtttttttcacccgggatacgtcagaggcgatgacgatatcagcacccatatcttttacggcggaaaccgggattctgtcgaccaccgcgccgtcgactaacatacgtccgttcattttttgcgggacgaaaacgcccggtatgctgatgctcgcgcggacggcttcggatactgaacctttcgtaaaaacaagcttttcgccggtctgaaggtcgcaggccacgatgccgagcgggatccgcagttcttctatcggcttgccgtacgtataggcatgaacgagctgcctgatgcggtctccttttaaaaaaccaagcctcggcatcgtataatccgcgtacagccgccgcttaaatgctttagcgacttttttcatcgtggccacgtcatgcccggctgcataaaagctcccgactaatgctcccatgctgctgccggcaatcatatcaattggaatctgatgcttatgtaaactggataacactccgagatgagcgatgcctcttgcccctcccgaacctaacgctaacccgattgtaggtttggccaacgcgacgaaccccctaatagacatcctatacatgaattctatggtctaaattgaacccctatgctcgtatattagtacaggatgacaaataggtacttgcccggccgcctttaaggtctgttctatattttatcatgatataaatgtcagtgtgcaattttagcatcggggaggtaagaatgaatttgtctaagtttcatacatttttgatttcattgtttttcatttttttgacggcgacggttatttcacaccctcaggcctcattcgaagcctccaaaaccggtctttccatgtggtgggaggtagtttttccttcattgcttccgttttttattctatctgagcttttaatcggattcggcattgtcaagtttgtcggccttttactcgaaccctttatgcgtcccattttcagagtgccgggggtcggcggatttgtactggctatgggcatggcttcaggcaatccggccggcgcgaagctgactgcacggctgcgccagaataaacaaatctccagagtagaggctgaacgcctcgtctcttttaccaattcatccaatccgttatttatattcgctgctgtggcagtcggcttttttcataacgcgtctctcggcattctgctggcatcggctcactatctcggaaacatcgccgtcggcctgacgatgcgttcatacggacggaaagaagaagcggcgtataccggtaaaaagacgatcgctctcccttctctgaaggaagcatttctggccctccacaaggcgcggctttcggaaaagcggccgctcggaaaaattttgggcgacgccgtcacctcttctgtacaaaccttgctgatggtgggcggttttattatattgttttcggttttcagccggttattatcaatcgtacaagtcatggatgtgctttctgtatttacaaacgcgctgctttcgctttttcatcttccggcaaatctggacatccctcttatcagcgggatgtttgaaattacacttgggagcaagctggtcagtgaagctgatgccgccttgctgccgaaagccatgattgtgagttttattctcgggttcagcggcctttccgtacaggcccaggtagccggcattttatcggaaacagatatccgctttaaaccgtttttcgcggcgcgtatccttcagggcatttatgccgcactctttattctcttactgtggaagccgctttaccttgcgttggacgaaccttaccagtccgtattcctccctttccgcgatcaggaagcggtatctgctgccgtcagcggttggaatacgcttgttgaaaccgggcccgctatcacgctgacagctctcgccgtatacgcattgatttattgttacaggctgtcagcacggacaaaaaaaggatgagacgccaatcagcgcttctcatcctttaaatttctgcttcagcgcctgttcaacttccggaggaacaaactctgaaacaggcccgttatattttgcgacttcttttacgatgcttgaacttaaaaaagagtactgattgttcgtcatcataaaaaaagtttctattgattcgtcgagcacgcggttgacggaagtcccctgcatctcatattcgaagtcagaaacggctctgagccccctgataatcgccttcgcctgcttttttttcgcatagtcgattaacagtccctgtgacgtctcgaccgtaacattcggaatgtcttttgtcacttctcttaacagctcacatcgttcctcaactgtaaacagcggctgcttagaagaattattgagcacgcatacgtacacctgctcaaacacgtttgccccccgtctgataatgtccagatgtccgtaggtaacgggatcaaaacttccgggacatacagctatacttgccacatcattaccccctatttcggtatatcgtcactcctgtaagcccgtaaatttcccttcttgttacagaaagcgcgccgacggcttcaggaagcgcaacggctttatcatgctcggctacgacaaaaccgtcttcattcagcatgttctgctcatcaatcatttcgataagcgctttcagcttttgttccttatacggaggatctaagaaaattccgtcaaaacctttttcccgtttcgccgcggcatagagggcccgctctgcatcattgcggtatacttccgctgaagacagcagatcaagcgctttgatattcgcttttaccgtttggatggctttgaaatcacgatccacaaagatacagcggtcaaatccgcgcgacagcgcttcaatcccgagaccgccgctccccgcaaacaaatccagccccgttcctccgtcaaaataagggccgatcatattaaaaatagactcttttactttatccgtcgtcggccttgttgatgtgcccggcacagcctttaaggctcgtccttttcttgaaccggaaattactctcattattcacaccactttttctgaaaactttgatgtttctcatcggctgagccgttatgtataaaaacaatccctatcttatcataaagcattctttcaaacaatgagcgtgaaatcgtgtatacatattcacattcctgtcaagactacgtgtaacagcatcaatgaatgatgttgttgccaaccgcggagaagacttacgtttccccataagttcttcctccggtttctcctctcccttttccttctccttaacttgttaaggaatagaaggaccccgcaggtatctgcggggatttttttatatgccgattttataatcgtactctttcgctttatcaagctttgattcaaattccagctttaaaaaaggtttataagaaggctctaccttcttcacataagaataagaagaaatcttttccattgttttttcgattaggtccatatcgcaatacagcacaacgtatttcagccgctttgaaacataatgaacgttgccgaattttctcagcattttgctgtgttttaaagaatgcagatatacgattatgccttggcgcttattttccatcatgatcacccgcctgactttctgttcattttatgtaaaagacgagacggccgtctcgtcaggaaactttgcatccgcagccgccgccggaaccgcagccgccgccgcaggatgacaggccgtcaaaataaggattccccgtcggcacttttacatgctccgagacggccgttccgagttcaatgctgatctcgtcaagcagcgactgaagctcagtctccgcttttttaaattcggccaccttatcgtttaaatccagttcccgcttcatttctctcattttgcgggaaatctctctataatcaggatggtatttgccaaagcgctgcacatcctcatactgctctttaacgctcataaaagaacgaatgatccgccctgcctcttcatcttcacggagacgcttgtaacaatcgcggtaattttcagccgtctcagactgcagaatcatgccggcaagctgctccgcttcactttgaagcttgacggactcaattgttgcatacataaatacgcacctccagttgctagtttaccatgaaaccacccaattggaaaatgcggcgtttaaacgctttttaatcctgtgaacgcatggcgtgaaccatctgcatcatcatctgcgccatttgaatcccgtttgagaattgacttacccgatgcggtatcgtcttttcataaaaattcatcatgtcaagctgaaaggaattgagatcgtccggttttctcgcaagtctgcggtaccagacgggacgctgccgtataaaccgtttccgttcctcatctgcggatatgaattcctgaacctcttttcgcatacacgatccccttctttaatccttcctgaacgaaaaaggatgttgtccggagccttgccggggctgcttcgtgctgctccccgaaaattggcttaaaaggctttgcaatgatgaaatggattggctcattttattgatctgctcattcatttggttgatatccatctttttgacggcagtgaccatttttgaaacgaaatcgtttttttcagctggttcctgtttggtttccgcgtcggaagaaggctgaacggcctcgtctttaaaagggttccatatcggatcatcctcgcccagaagcacccaattttcatagacttcctgccagcttctttgttccttgcgaacattttggatcagtttgggatgcttttttacgaattgtttaaaatcatcgattgattgccgtgattgctgattcgccacaattctcaccccctccgaaaagttttgcctgctataatgtatcggttcatacgccttaatgttcgcctaaattgcgaaaaaaagcaggtatatttttttcagcaggagcgccgctcgcgaaaaaacataaaaaaaccgcgggggacgcgcccctctgcggttttttactgccaaggcttaatgaagttttgcgtataatacttccggtccacgccgacaccgaggtgcgtataatccgggcttaacagcgcctttctgtggccttcgctgttcagccagccctccacggctgcaggaccgtccacatagttgtaggcaatattttcaccggcctcccggtatttcacatcgcctttttccaagcgatccttcagagtcccgtatttttttgagacgtgagagaaatacttgttatccttcatgtccttgctgtggccgaatgccacttttgcggcgccttcgtcccatttcagccttgcaaggccatgtttcacgcggatgacatttgtaatatcgagaatctgctgctcactcgctcgctcaatgtcgttccatttttcatcagaaacaggttcggattctgtcagctttcctctgtacatgacttcatacggcctttgtttcacaagtgtttccgcatcaaatgccctgatgcttgacagattcccgtcaaatttgtccatgtacagctgaacatacattccgcctatcttgacggtgggacgggtattgatatcttcttcagaaaactcgaaccgatacgtgtttcccttgtcagtcacattgacaaaaggagaaacctgcgtcgttttaaaaacttcgcccgtcgattcgccgatcttaaacggttttgcgttgatgccgcttcccgaagcgtataaagtcacggctttatcattcaaaataccgacttgtacgtattggtctttcccctggttgtacacccaccactcgtaatcgtaggcagaaggatctttccgagacggttccccaagtttctttttcacatcggcggcagatttccccatgagagaaagcagtccggatgacggcattttcagccgttttccgctctcttcttcattggaaacctgaggctcctcctgatccgtctttttctgaggagccgatccatattgtataaacagaacatacgctccgtaaataagcaaaaggataacgagagcccttgcgatatttttcaacctctcacccccatatgttcaaaccgttctgtttttgtttactcttatacagtacagcctatttgcatcgtccgtgatttatgtttaatggataaacccctccggaccgccgtcttcagaaatgtcagacagcgcccggcctgcttgctcatttgattgctcggccaacgaaagatcgccgagcgtaacaatgccgaccagttttttatcctttgtgacgggaattcttctgagctgatgttcagccatcaaatggagcacctcctccacagaggcgtcttcttctgcactgataacccgctctgtcattgcgtcggttattttttgagagttcggcttttttgaagcaattccccgtaatacgagatctctgtctgtcacgatcccgacaagggtggcgccgtcttcatccactatcggaatggcgccgacatccgcgtctttcatcttcaccgcagcttcatatacattatctaatactgtacaatattgcaagtctgacgtcatgagcttattgatctttgtcattgcggaattcctccttttttctgctactattgtcgtcaaatttttctttttgcatactttcaccgtatgaatcattgaaagtgtaacgctttcatactatgattgtcaggaaagggcatttttaaaaggagggggaaggtttgaagtttgaaaacagcggtcttgaaggggtaacagcggagctcagccgcttgaatgatctgatggaaggtaaagggctcattctggctggacaatgggattatgaaagagtgacttacgacaaaaagttttcagtacctgaggggacattttatctgcggattcaaggaacggcaaaagagggcgatgtcggcggcagccgggccgtgattcagctgaaggcccctcttttaggaaagcattattatccgcacggcgtagaatacggcagcgctgaagaatttccggaacatgtcgtcgctgaaagcaaagctttactgcttgaattggaagagtcattaaaaacagtgcaaatgtaataaaaaagtacagcatattctgctgtactttttttcatgagacggtatgctcgatatacggcggctctgacggcgtatctttttcccgttccgttctgacccactgaaaaaagatgacagccaaatatgttccgtagaccgcctcttgaatgattttcatcagtactgccccaagctgctgatcttccagaggaggcagcgtgttgaacatctccggtccggataaagggatctcgtccagcaaatctaaaggaacgcaaagcttcattgcttcggcccaagccgccggatctgtatacgtggcatacatgggcgccccgctgaacataatgagcgcgcaggcgggcgttaacagaatcccgtctgccataatataccccagcttcattaaaccgctgagacggggcagaccgtccaccttatgcacaagcggccaccacataaaaaacgccgttacaaagatgagtccgttcatcagcgtgtgatacagcgaatccgttttgacgaaatcaaatataaacgggatgtgatacagtgaaaaaataccgttaaacagcactaatgcgataagcggcattgaaaagaacgaaaacagcggctttacgacaggacggaagatcagttttttccatgcccagccgggaattccggaaatcaacagcggcggtacgactaaaaacagaaccgccatctgcgtcatatgagcgctgaacatcacatggcccaataaatcaaccggacttcccgcagccgtgtaaaaaaatagcgcggaaagcacaaacagcaccttctccttagcggccacacgtcctttatgccggctgcaccagtaaaagtaaacacctgttatcacggcagttatacaaaacagatacgggctccacattgcgcgaaacccgaacatttccaaattaatcaaatctctcactccccgccgccccgattaccaccaaataatcgtgacaaatgcaagcacggtgataaacgcgacaaatattcccgaatacagaaataatgacggcgcttcatgccccttctggctcatatgcataaagtaaaacagctgaaagatgacctggatgaccgcaagcaggatcagaaacggcatcgtaaaccatccggcaatgccgtcagcagccaccgtcaaaaacgcgacaagcgtaaggccgatcatcaaaccgaaggatatgacctgatacttcatctcctcggcatttttctttttccgatattcgagatccgtactgacagtccctctgtttttgttatcgtccatcgttatcccaccatccccatcaaatatacaacggtaaagataaagacccacacgacatcgataaaatgccaatataagctggccacataatatttcggcgcattataaaggctgagccctcttttcgcattccggatcataagcgcgctgatccacaacagcccgaacgccacgtgtgctccatgtgtgccgacgagcgtgtaaaacgctgagccgagcgcagagcttgtaatggtaaagccgaattcgtgagtgtaatgcataaattcatagatttctacccctaaaaatcctgctcccaataaaacggtaaccaaaagccacacctgcatttttttaaaggagaaatttttcatatgatacatcgcatacacactcgttaagctgctcgttaaaagaagcatcgtcgcgataaatacgatcggcagctcaaacatctctgccgttgacggccctccggctttagattcccgtaaagcaaggaatgttgcaaatagagaggcgaacagaaccgtttccccgccgagaaacagccaaaatcccaaaaacttatttttcccttccagcgttgctttttcaggagaagccggaaaggtttcagccgtcattttttcctgcagctgcattacgccttcacccctttatcatcattcggcagatcttctttgtgaatatgatagccgtaatcatcgaccacagagcgaagcagcatggtaaagaatgtgatgccgagccctatgaaaataaccggaagcccccatgaataatcggagtggtataaaaacccgaacgctgcgacaaacagcccgaaagatatgataaacggcatgatggagccgttcggcatatgaatgtcctctacaggctctgcaggcgccatcccttcatttccggcctgcttttcaatccacagcgggtcaagtccccggacaaacggaagctgtttaaaattatattccggcggcggcgaagagaccgcccattcaagcgtacgaccgtccagccacgggtcgttcccgacgtatttcccctttattgaggtataaataatattgacgacgagtaaagcagccgcgcccgccatgaaaaacgcgccgattgaactgatcaggttgccggtatcaagcccctggccgggcagatatgtgtaaacgcgccgcggcattcccatcaaaccgaggaaatgctgaatgaagaaggtaagatgaaacccgataaaaaataagacgaacgaaattttccccatcgtttcatgaagcaccttcccgaacattttcggccaccagaaatgcacgcccgccaggatgccgaacacaacgccgccgataatgacgtagtggaaatgcgctacgacaaaatacgtatcatggaactgataatctgccgctgcggccgccagcatgacacccgtgactcctccgagtacgaaagagggaataaaggcgacggcatacagcataggcgtcgtgaatttgacgtttcctccccagatggtcaaaagccagttgaaaattttaatgccggtaggcaccgcgatcgccatcgtcgcaaccgcaaatatcgcattagcgatcggtccgagtcccgtcgtaaacatgtggtgaacccaaaccatgaacccgagaaagccgatcagcacgatcgcaaagaccatagacgaataaccgaacagacgtttccttgcaaatacgggaatgatttctgaaaaaatcccaaaggcgggaagaattaaaatgtatacttccggatgcccgaaaatccaaaacagatgctcccagattatcgtattgcctcccaattcaggattaaagaaattggttccgaacaaacgatccagcatcatcagcgccaaaccgacggtgagcggaggaaatgcgaataaaatgagtgccgacgccacaaatgtcgtccacgtaaacagcggcagtctcatatacgtcaaacccggcgccctcatattaataatcgtggcgagaaagttgatccccgcaatgagcgtacctaagcctgatatttgcaggccgagcacgaaaaagtctatgccgtgccctttcgaattcagcgcaagcgacgcgtacgacgtccagcctgcatcaggagcgcctcctaaaaaccagctcagattcaaaaagatgcctccgaagaaaaacagccaaaatccgagcgcattcaaaaatgggaatgatacgtcacgcgccccgatctgcagcggcacaaccgcgttcatcagcccgaataacagcggcatcgccgccaggaagatcattgtcgtgccgtgcatcgtcataatttcattaaattgctgcgcacccataaaatcgttccccggcctcaagagctgaatcctgataagcatggcctcaagtccaccgacgacgaagaaaaatcccccggcgatcatatataaaatcgcgattttcttatggtcaaccgtcgtcaaataatcccaaagcaaagagctttttctttgctgtcctgtaagcgtattcatcatttacgacctcccccctgatatctccctgtcctcacttgttctccgctttcagcccttttaaatattcatacagcgcatccgtttcagcgtccgagagcttcggataagtgcctgtcattttattgcccggtttaatgctgtccggatttttcagccaggcttttatattctctttattcgcatccttaatgccggccactttgacccgttcaccgaaggtagcgaggttcggagccgttcttgccgcttcagcccgtttatcattgggctcaaccgcatgacagctcaggcagtttttttccttaaacagctcttctccttgcgcggctaaaccggaatctgttgtatgcttataatttttcatcgctttcgtccattgtttaaattcttttgacggcagcggtttcactttgaaatccatcagcgcatgtgaaggtccgcacagctctgcgcatttcccgaagaaatattctcccgcttctttgctgcgtttagaatcgaaagtcagaaagaaagtattatcattatccgtattcgtatcgatttttcccccggctgacggaatccagaaagagtgtttcacatctgaggacttcagcttgaaatagacgcgttcatctgtgggaacgatcagctcctgacttgtcacaaacccataatcaggatactcgaattcccaccagtataaattcgcccttacattaatcacgagcgcatcctctgctttacggtttttcttatccatcggcgacgtatccgccagcgccaatgtatcgatgacaaccggaatgacaagaataatcagaagcaggatcggaataacggtccaagtgatttctaaaaaacggttcccctccacctgtttcggtattgtgtcttcccctatacgcgaccgtctgaacctcacaatgacgtaaaagaaaataactgctacgaccgcaacgacgacaaccatgataagtgtgctgagcaccgtcagatcatattgtttatcagccacttcgccggcaggcttgagtgtggacagaaacggttttccacagccgctcaataaaagcggcactaaggctaataatgataaaagacgccaacgctttaacatttcacccaaccccttttttgaatcagtacgagatgcacaagcagtaaaactgcttccagccgaaatacttcatttcctcatttcttaaaatatgagattttttacttaaaattccatctatgtataaaagcaaagccgcctgattaaacaaaaggtcaaggcggcgtttactagttgtcattgtttgttttggcgatcaaacaagctcattattcaattaaaacagcgtgaagaccaccatcgctacaaaataaatggtcatgtaattaagcgaatagacaaacataagagttgcccacttcatgatgtttttcatgcggaatcccatcagtccgagaacaagccatccgacattcagcaaagtgccgagaatgacgatcggaagaccgagactgccgaggaaaaacggaagcggcagcaggcatgcgacccagacgataatctgtcttttcgtcacttcaaagccgtgcactaccggaagcatcggaatattcgctgctctgtaatcttccgtctttttaatcgcaagcgctaaaaagtgcggaatctgccagatgaataaaatcatgaataaaacccacgcgacaacaccgatgtgcccttcaaccgctgtccagccgattaacggcggcacggcgcctgatacacttccgacaaccgtattaatcgtataacggcgtttcgtccacattgtataaagaacaacgtacgtaaacacgccgataaaaccgatgactgctgccatcacggtggtcatcaaaagcatgataagtcctaaagcaatgagtaaaattcctgaccacagcgcttgattcggctgaatctttccggttaccgtcggccttactttcgtgcgttccattaaatgatcaatatcacggtcgtaatagttgttaaccgcacaagaaccggcgatgatcaaagaagatcctattaatgtaagaagcacggtgtttaaattgcctaaaaaactcagaccggatatatgtaacgcaagccacatgccggtaaaagtcgtaattaaattcgaattgacgattcctattttgataagcgaaaggaaatccttccatgccgtcgtctcttcaatctgtccgtctatagctgtatcgtttaaaattctggaattagccataacgtaaacctcccttacaaacctaaagcaggttttttaagacctgcaactctatcatacaagataatgacctgtaaaaaaacatcctcttaaatattaaacgagaaacaggaatttatttgtgaactttttatgaattttaccaaatccgccggtttcataataaagcggttactttatttctatcagacccatctggaataatcaaccccattatctaagaagtcctgattctattatatttttgtgaacaaacagaattgagaattgccacaaaacacatattcgcttacacttggtacgtatatcattttgtccagtttgttaagaaggtgaatgtaaaatgaataaagctttgaaagcgctcggcgtactgacgacattcgtcatgctcgtcgtgctgatcggcggcgctcttgtcacaaagacaggatcgggtctcggatgcggacggcagtggccgctttgccacggtcggtttttcccggagcttaacgccgcttctatcattgaatggagccacagactcgcaagcggtgtctcaatcgttctcgtgctgagtctcgctttttgggcatggagaaaagtcacgcctgttttccgtgaaacaacctttctcgccattatgtccattatctttttatttttacaggcgcttctcggcgcattagcggttgttttcggatcaaatgcgctcgttatggcgcttcatttcggcatatcgctgatttctttcgcttctgttctgattttgacgctgctcatatttgaagctgataaatcagacaaaaagctcgtcaagccgctcagaatcggcaggaaaatgcagtttcatatgatcggcctttcgatttacacgtatatcgtcgtttatacgggagcttatgtgcgccatacgaaatcaagccttgcatgccctgacgttccgctttgcagcaggctgaaccacgggcttccgtctcattttcaggaatgggtgcagatgggccacagaaccgcagcgctgcttctgttcgtatggattcttgtcgcttttgcgcatgcggtgcgctcctacaaagatcaaaaacagattcttgggggctggatagcggctcttgcctttgttgtattacaggcgctctccggaatcatggttgtttattcagaaatggccaccggctttgcacttgcccattcgctctttattgccggcctgttcggcgtcttatgctatttcttattattaatcgcccgcttccgctatgaatcaaaacagcggaacatctgaggcacatgaaaaggccgaagcattagagcttcggtctttttacatataaaaaacctgatcgcacacgggggcggatcaggttttttatgttcattttttacgctttttcaatttcgatcagtaaatcgcctgtctgaatcggttcaccgtttttcacatgaatctgctgtatcgtcccggagaacggcgcctgtaccgtcgtctccattttcatcgcttcattaatcatcagatgatcgcctttattcacctttgccccggtttccgttaacaatttaatgacggttcccggcatggatgccgcaatgtggcttgggtttgtccgatctgcttttaatttttcctgtacggacgatttaatgctttcatctttaatgaccacctcgcgcggctggccgttcaattcgaaataaacgacacgtgttgcatctggctgcggttcaccgatagatacaagcttcacgatcaacgtttttccgcgctcgatttccacttcgatttcttcaccgagtgtcatgccatagaagaaagtcggtgtgtctaatacggaaatatcaccgaagcgttctgccgttttaacatattcagtaaacaccttcggataaagagcatacgcgattgcgtcctgatcactcaattccatctgatgtgtttctttccattcttctttaatgccttcaaaagataccggttcaagcagctcacccggtcttaccgtgatcggcgtctgtcctttcagaacgagcttttgcagtttttccggaaatccgccgtgcggctggccaatctgccctttaaagagctcaacgactgaatccggaaaatcaagcgtttcgcctttatcataaacatcttgttctgttaaattgttttgcaccatgtaaagcgccatatctccgacgactttggaagaaggtgttactttcacgacgtcgccgaacatgcggttgacgacgctgtacatgtctttcacctcattccagcgatcaccgaggccgactccttttgcctgctgctgcagattgctgtactggccgcccggcatttcatgattataaatctcagtatgcggagacttcatcccgctttcaaattcactgtaatactgacggacggattcccagtattgcgacagtctttccacctgccggacatccatttcaggacggcggctgtttccttcaagggcatgataaaatccgcttgcgctcggctgtgaagtcagacccgccattgagctgacggcgacatccacgatgtccacacccgcttcaacagctttggcatagagaaagacgccattgccgctcgtatcatgcgtgtgaagatgaacgggaatatcaatcgtttccttcagcgctgagataagttcgtatgcggcttgaggtttcaaaagaccggccatgtctttaataccgagaatgtgcgcaccagacgcctcaagctctttcgccatagaaagataatattgcaaatcatatttcgtccgggtcttatcaagaatatctcccgtgtaacaaatcgcagcctccgccacttttccggtttcacggacggcatcaatggccagcgtcatcccttttacccagttcaggctgtcaaagatccggaatacgtcaatacctgattccgctgactgccggacaaatttttggatgacattgtccggatagtttgtataaccgacggcatttgatgaacgaaggagcatctggaacaatgtgttcggcacttctttgcgaagatcttcaaggcgtttccaagggtcttcttttaagaaacggtacgctacatcaaatgtcgcgcctccccacatttcaaggctgaacagttcaggccacagggcatccgtaggattcgcgatttttttcaaatcattggatctgatccgggttgcaagcagagactgatgggcatccctgaacgttgtatcggtcaggagcacggatttttgctctttcacccagtctgcaagcccctcagcgcctctttcgtcaaggatctgtttcgtaccgcttgccggcttttcttcgatatctaacgtaacggtctgaggcttatcaaatgcaggtttttcttttttcccgattcccggaaaaccgttcaccgtgacattgccgatataggaaagcatttttgttccgcggtccttctgttttgggaaaacaaacagctcaggcgttgtgtcgataaacgatgtgtcgtattggcccgtcaggaatttttcatgctttgccacgttttcaagaaacggaatattggtcttaatgcctctgatccggaattcctgcaggttgcggaccatttttgctgatgcctgttcaaacgtcagcgcccatgtcgacagcttgacgagcagtgaatcataataaggcgtgatgacggcgccctggaagctgtttcccgtatcaaggcggacgccgaagccgccgcctgagcggtaagccataattttacccgtgtcaggcataaagtcattcagcggatcttcagtggtcacacgtgattgtatcgcatacccgtttgtaaaaatgtctttctgctcagggatattgacggcacggctgtggagtccgtagccctgagcgacgaggatttgcgtctgaacgatatcaacccccgttatcatttccgtaatcgtatgctccacttgcacgcgcgggttcacttcaataaagtaaaattcaccgcccgctacgagaaattccacggtccccgcgttgatatagccgacatttttcgcaagcgccacagccgcttcacagatttcgtcccttaattcaggctgcaaagatacactcggcgccacctcaatgaccttttgatggcgtctctgaacggaacagtcccgctcatacagatggacgacattgccttctttatctccgatcacctgaacttcaatatgcttaggattttcgatcagtttttcaacatacacttcatcgtttccgaatgcagctttcgcttctgatttggcccgttcaaacgattctttcaattcgctttcacttcggacgattctcattccgcggcctccgcctccgagcgatgctttaataataaacggaaatccgtggacttttgcgaattgttcgacatcttttaatgtttcagccggtccgtcactccccggaataacggggatgccggctttttctgcctgctccctcgcctttaccttatctccgaacatatccaaatgcgctgacgtcggtccgataaatacgatgccctcttcttcacagcgtctcgcaaattggatattttcagagagaaatccgtagcccggatgaatggcatcaacgccgtttctttttgcgatctcaataatcccttcaatatcaagatacgcgtcaatcggttttttgccttctcccacaagataagcttcatccgctttatagcgatgataggagcccgaatcttcttttgaataaacggctaccgttctgatgttcaattctgtgcacgcccggaaaatccggatcgcaatttctcccctgtttgctactaacactttttggatggattgttgtgacaaacttttctcccccttggcctaataaatatgtagtttataataaaggaatatccgtcctgtgtatacacttgttttttagagatacacagatttttccgtctgccgtctttttacccccttagacggaacgggctccctctttttcttcttttctgagtacttgacatgcatgctgacattcaccaatataccggcgctcattaataacaataacattgatgagcccccgtagctgataaacggcagcggaacacctgtaatcggaattaagccgctgacaccgccgagattgataaaggtctgaatcgcaatcatgctggatatcccgattgccaaaaggctcccgaacggatcttcacattttctcgcaatataaaaaccttttaacacgacaaaagccagcagtacaatgacaaacaggacgccgaaaatgccgagctcctctgaaataaccgccataataaagtctgtatgcgattcaggcagataaccgtatttttgaatgccttctccaagaccgagaccgaaaaaaccgcctgagccgatcgcataatacgaatttataatctgcaggcctgatgtgctggcgtatttaaatggattttcaaggctttcaaaccggctcatacgaccgggtgtcaaaatatcgtcccatttcagatagatgatcgggctgacaaggagcaatacgattcccgccatgagaaccagcctgagcagggtccttccgctgaatcccgaacacataatgacgcaaaacgcgatcagaccgataatcattgccgttccgaagtcgggctgaatggcgataagcgcacaaataactacggtgacgatcaccggcggagcaacccccgtcaaaagctgatcgatgtagctttgtttctttgcgtataccgcggcaaggtacagtatcagggtcagcttgacaaattcccccggctgaatggccattccgccgattttaaaccagctttgcgcgtttccggcaacatgtccgaaaacaaacagcgcgcaaagcgcagccactgacgcaagcagtatgaatttctgaatcttttgatgggcgaacactttgtacggaaaaacggccgcgatgataaacagcacaaaccccgcgatgacggcgaacagctgccgtttaaagaaatagtcgctgctcacgccgtaacgcataacggcggtaatcatgcttgagctgtataccattaccaatccgaaacagcacagcagaatgatagcgcatatcaatgaataatcgtaagattttaacattcttttaaacataacatcctctttcctgcttaaagcttacgtttaatacctatagcgtattatattttactataattcataaacaatttacgcagtttctttatagtttttcggatgaaatgcagattaagagaccgtcttacgaaaagaagatgcaaaaaaacggtttacggttataaaaaaacccaaaccgttgaatagtttgagtttgatcatttattttcctgtaaacgcgtcatgcaaagcagacagttctctttcaagtctgtccagcagctctttgccgtcgttttcgtcaactaatcccaggcggacagcaaaatcgatttccctcgacagtccgaacatctgagtatccaagacctcttcatacagaggacattgaggcatcgttaagttatccatttgtactcggatcagcttcaaaatcttctcagcatctaattttaacagctcgaatgctttctgctgatggtcaactataatctctgaagccaaaagtatccctccgttccccaggcgagtacctaattcttctatttatcataaagggtatcaggtgaaattgcaagaggatttaagcagatgttatgataaaaaatgtttcaaaaaatactcagcctgtatttctcagacatgatttccaaaagcttcacacccgcgatgctgttgcctttttcatcaagcgccgggccgaatataccgattccgaagttgtacggcgaaatgcccatgattcctcccgaaacgccgcttttagcgggaatgccgaccttgattgcgaattccccgctcgcattgtacatgccgcatgtcaccataaacgtcttgcagattctcgccgcatcttttttaatgacctgctccccggtttccggatgcttgccgtcaagggcgaatacacagccgattttggctaaatccagactgctcatcttaatcgcgcactgttttgtatacaaatccatgacctcttcaacatcgcctttaaaaatgtcatactgcttcatgtaataacacatggcccgattaatcatggatgaactgaattccgattccgcgacatggctgcaatatgtaatgtcctgattattcgcaagtcttctgatgaatccgagcaggtaatccaggcggtctttcggcgaatgccctttaattaagcccgtaacgacgagagcccctgcattaatcatcggatttaaaggcttgcccggattcactgtttcaagcttaatcatggaattaaacgggtcgccggtcggctcctgacccacgcagctgaacaccttttcctttccgtaatccatcagtacgagcgccagagaaagcactttcgaaatgctctgcagcgtaaatgtccggtcggcgtctcctgccgtcagacatgtattttccgcatgataaatcgtgaccgaaaggctgtcttgttcagattcagccagagccggaatatagtctgccactttgccttcttcggttctttttttcgcttcctgaactaatgcgtccagctcttggtaatgccggcataccatgtcgatcaccctcacttcgctgccgttgtatacatctaatttgcgacgcaaagtgacaattcatgcgaaaacttttatactttaagtaaaggggggcttcaccatgagcgttattcaagtaaaaggcaatgttacatacccgattacaattgatccgagtgtctggattttcgatgaccgcaagtttccgtttgaaaaaaatcagcccgttcatccggacggctctgcagaaacccaggagcatacgcttgatccggaacgggtgatcagagaagggcgcatttcgccgccgactttaaaaagcgaaaaacgttatgaaaaagaaagactgatgaacggcagcttcgccatgaagctcggcgctgttttagcaaatgccgagccgaaagaaagcgctgtcctgtgcgcatttatttcaaaatcagaaagaaccgaagtgccgctcgaaaaggcgatggacgcaatcgcgcatttcagcgatgcggggaaaccccttcaagacggcggcccggtccatttttacgtggacggagactttgaaaaaccgataacgggagtcacagaaatcgaagttttataacaaatcggcggcaagctgtgcaaggccggatctctcacctttcacaagcttcacgctgccggagacggtttgttctttaaaccgttctacaacataagcaagtccgttgtttaaactgtctaagtatgggtgatctatttgctccggatcgcccatcaggacaattttgctgccctctcccacccgagtcaaaagcgttttgacctcgtgcctcgtcaaattctgagcctcatcaataataataaactgatccggaatgcttcttccccgaatgtatgtcagcgcctccacctgaatcgatccgattcctgccaaaatcgcttcaagttcacccggctttttcgcattgaataaaaattcaagattatcaaagatcggctgcatccacggcttgagcttttcctctttttcgcccggcaaatatccgatatcctttcccaccgggacgatgggacgcgcgacgatcagttttttataaatcccgagatcctccgtctgcagaagccctgccgcgagagcaagcaaggttttacccgttcccgcttttccgatcagggtgacaagcgggatatcttccctcagcaggagttcaagcgccattgtctgctggacgttcttcggcctgattccccatacgtgctcatcatcgaagacgagtttttttacggtctcccctttcttatctgtcatgccgaccgcggacgaagatccccctaattcatctttcatcagcacaaattgattcggataaacctgatgctgctgaagctccttgactgaaatttgtttgtttttataaaacgaggcaaaccgctctttattcataaatatatctttgtacccgctatatatttcatcatggtcaacgactctgtcgtttaaaaagtcctccgccaaaagcccgatggcatccgcctttaccctgacaagcacatctttgctgaccagaatgacgaggcggccgttttctttcgtttcctcctcaaggcttaaattttttgccaccgccaaaatgcggttatcattcgttttttcgataaaaatttcttggagctggtgaaatgaccggtggttcagttcaattctgagcgttcctccgctttcaagcggaactttctcgtgcagccttcctttctccctgagcccgtctatcagcttagatacgtgcctcgcatttctcccgacctcgtccatataccgcttttttgaatcgacctcttccagcacgacggcggggatgacaacttcgttttcttcaaaggaaaaaatagcgttaggatcctgcaaaagtacattcgtatctaacacataaattttactcaagtctcagcctcctgaaataaggatcaaagcccatcgtgtgcttctctttccgcgaataacggggatgcctgctaaaatatatgatttggtgcataaagatagaaggttaattcaacaataaaataaatgaaagcattcaaggaggaaatctgacgtgcgaattctttttatcatcatacaagccttgtttatccttaccggctgcactgctgtacaggacggccgcggccgcaatattcagaacgaatcagccgatcagcgcgatgcaaaaccgatccatgtgaaaaatacggctcctgagacagctgaaaatcccggccggacagacatcgctaagcatctcgtcgaggtaaccgaaaaaatccccggcatttcagatgccaccgcggttgtactcggaagatactccgttgtcggtatcgatgtggatgacaatttagaacggagcaaagtggaaagcattaaatacacggttgcccaagcgttaaaaaacgatccttacggcgccaatgccgttgtcgtcgctgatcctgatacggtttcccgcctgagaggcatgggcagcgacattaaggccggccgccccgtttcaggcattttggacgaacttgccgccatcgtcggtcgtgtcatgccggaagtcccgaatgatgtgaccgacaatgaaaaagaatcaccgactcaatcgaatgatgatcagctgaaccaaagagaccagaacaagctgcagaacgaacagaacgatcaatcggatcatcatatgaaaaaccgccggtaaaaagcagcgcccgctccatagaaagggcgctgctttctttccctttggcaggaggggcatccatgatataatgcttgtcatagtgaaagaggtgaaaaatcaatgagagtaaaatgttccatttgcgacaaaatcgaacaaattgatgatgaaacactgacagccaaacgcctccgcaatcgtccgattcatacatatatgtgccgggaatgccatgaccgcatcaaagtcaaaacggaggcgcggctgaataccggacacttttcctttcatcccggacaaaaagcgaaaaaagataaactgaaaaaataaaccgaataaaaaatgacccgccggaaggcaaggtcatttttttattgcggtttagctgactggctttttttggactggtgcagacggattttgtaaacgatcaaaatcaaggcggcgacaacaagcccttctccgaccggcagaaacacaccaaaaaaagtcagtacggtgcagccgagcacgagaaagagataaactgccgcagccttcaacaccggcagccgtttggcaaagccgagtttaaatacaatcaccgaaagcacgacgatcgttccgtataacagccacattcccgtcagcggatgctcatccacttggtaaagagccgcaaagaacgacagccgttcacttacttcattcaaaaggatccccctccccttttccgttcgggttctacctcttcaaattctgcaagtgattaagacattcctgctgtttttttctttttcgccgctttttcacgttcgtttttattcaggattttctttcttaaacggatggattccggcgttacttcacagtattcatcttcgtttaagtactcgagtgattcttcaagcgacataatgcgcgctttcttaatcgtagtcgtttgatccttcgtagcggaacggacgtttgtctgctgtttcattttgctgacattgacgacaaggtcattgtcacggttatgttcgccgacaatcatgccttcatatacttctgttccaggctcaacgaagatgacgccgcggtcttcaataccttgaattccgtaagatgtcgcttttccgttttccatggaaacgagcacaccctgacgtcggcctccgacttggcctttttgcatcggctgatagctgtcaaacgtgtggttcaggataccgaaaccgcgtgtcagtgacagaaactcagtagaatagccgatgagtccgcgtgaaggtacggtaaagatcaggcggacctggccgtttccgttattaatcatatcaagcatttcgccttttctcgcacccattgattccataacagaaccggtatgctcttcaggcacgtcaatctgtacgcgctcaacaggctcgcagcttacgccgtcgatttccttaatgataacttcgggtttagacacttgaagctcatagccttcacggcgcatgttttcaattaaaatggacaggtgaagctcaccgcgtcctgaaacaacccatgcgtcaggtgatgcagtcggttcgacacgaagactgacgtctgtttgaagctgcgcgttcagacgctcttcaattttgcgggctgtgacatatttgccttcacggcctgcaaacgggctgttgtttacaacaaatgtcatttggagcgtaggctcatcaatgcgcagaaccggcagcggctcatggtggtcagccggacaaaccgtttcaccgacgttgatgtcttccatgcccgaaacggcaacgaggtctcccgctctcgcttcttcaatttccacgcgtttcaatccttggaaaccgaagattttcgttacgcggaatgattttaccgttccgtccagtttcatcaatgaaacctgctgacccactttcatcgtgccgcggaaaacgcgtccgataccgatacggccgacataatcattgtaatcaagcagcgccacttggaattgaagaggctcttcggcgttatctaccggggcagggacatgttcaagaatcgtttcatacagtgattccatattttcgtcctgctttttcggatccagacttgccgttccgttaatcgcagaagcgtagacaacagggaactcaagctgttgttcgtttgcgtcaagttcgatgaacaaatcaagcacttcatcaatgacttcttccgggcgggcgaaatcacggtcgattttgtttacgacgacaaccggatttaagttctgctcaagggcttttttcagtacgaaacgggtttgcggcatgcagccttcatatgcgtcaacgactaacagaacgccgtcaaccattttcataattcgttcaacctctccgccgaagtcggcgtgtcccggagtgtccaaaatattaatgcgtgtatctttatagttaatcgcagtatttttcgcaagaattgtaataccgcgttcacgttcaagatcgtttgaatccattgcgcgttcggcaatattttcgttggcacggaatgttccggcttggtgaagcaattggtctaccaaagtcgttttcccatggtcaacgtgggcaataatcgcgatgttgcgaagatcgtttcgaagtttcacattttcatctcctaaaaaaattagataactttcatattataccacacatcctctttaaaagcgttacgtttttctgtaaactgaaagtatgacgttaaaggggatggaaatatgaaaaaattgaattggctcttattattatttgcattcgcagcagtcttcagcatgatgctgatcggcgtatcaatcgctgagaaaagcgcatggggcatcatcggaagcattgttctcgttatcgccatgatgggaagcggtttcaccgtaaagaaaaaaatgcgcgaacagggactgcttgattaaaagcatgaccctttgcaaaattccgtaaacatgaaaagcacaatatctaatgaagcctgaatcaaagattcaggcttttttacatcctcaaaacatgctttagacgtaaggcttatctcccccgccgcctagtcaggaagccggaaatgacggcccccactctagttacatcagcagattccctcagaaaatgcagtctgaaatagtccagcatcgttatgcagaaaataccatacctcctatatcaattccatcattgtctttttatacttgtggctgtaagcaaatacacatgacaaggagagaatgaaatgaaaacatcttttttgaagaaaaccgctgtaactgccgccgcaaccgcctcagccgccttgcttgcattcagtccgcttgattctgccagcgcaaaaacgatccaggcaaatgaaccgcatgtcctgcagacttccgcagagaaaacaccggaagacgctgcaaaactcattgacatcatcagccaatcgatttacgaaaaagacggtgtctattattttgacggtgaaaaagcggttgaattgggattagatcaagaacaagcccagatcattcaaaagctgtgggacagttcaaccgaatttttaaccgttctttcccaatgtattgagaaaacggacggcgaatatacatttaataaagaaaaagcggtggagctcggctttacggaaaaagaggcccttatcgttgatcagctgttcaccgctttttcccaaagtcttcatatccttcaatctgcgctgattgaagaagacggtgtgtatacgtttgatcaggaccttgctgaaaaagcaggagcaggaaaaaaagaagcaaagctgtgtgccgggttctttaattcactgccccaggaattgcttgaaggcatttatacagcctttcatccggctgagtaaacggattaaaacgcccggtcattcagccgggcgtttttttaaatcagcagtttaaggatcagcatgataaagaaaacagcgccgaacaaacaggctgcttttatcagcagcttcccgtaataccgttccttaaaccgcctttcttcttctgcataacaagcgggcgccttcatctcagggctgccgaggtcaagcggctccttcatcatatgatataaactcccgcacttaccgcatgattcaagatggcgggaaataaaccgctccgtttctgtttcacaatcgccttcaatatataaagggagtaaatctctcactaaacagcaagtcatatctgtccgtccttccttttttccgccaagtgctgtttcagctgcattctcgccctgtacagggtgctcttcaccttcgaaagactccagtccaaaacatctgcaatctcttcgtaagacagctcttgaaattcccttaaaattaaaacggtctgctgatcgcttttcagacgctgaatctgcccggtcagcgcattctgagtgtctgtccgggcgacgtaatgctccggaagttcatatgttgtttgctgaagcccttcattcagagtgatatctgaaaattgatattttctatcacgtctgtaccaattgatgaaggtatgatgggcaattgcatagagccacgttctgatagacgaatggcccttaaacgactcaagcccgttaaatgctttcataaatgtatcctgagcgaggtctttagcggtctcagcatgatgtgtgcgtctgtaaaggtaatacataatatcttgataatgttcacggtacagctgttcaattgacatcttgtttttcatttaaaaataaaaccacactgtcatccagattgagagcactatgaagaatccgtacaatccatacgtcaggcatttcatgtatttaatctggcggatatcgccggacggcgcattcaaaccatgttcatactgcccttttctgttttccgcctcagctccgaataaatgctcatgttctttcatccactggagcgtgccgccttcgagttccccctccttatataggtcgtataaatcgaagaagacagcctttttttctttattgttcataaaggttcaccgcctcgtaagtatccgcgttcactacatatgcgtcatgacggtttgaaccgaacggctgaataatgacgagccatgcgttatatgttacgccgtctttcaccgctatgacaggcttcacccgctttttgtaaatgatgccgttataagctgccgccacttttttgaaggctgtttgtccgtctctgtatgtatgcgggaatgttttggcacttacctgtccgtagaatgaggcctccttcatgccttcttcattccggagcgtataaacgaatgtgccttcagtgttttcaaaaacgagattgccttccgatttgtcaatttgtctaagctttgaagtatccgcgtccagcaatgaaaaaagcttcttctgaagttctgtttttgttaaaacggtgctgtcaggtgagactctgattttcataagacgtccggatactgcatcaaatatcagctccgttccgttattcgcagttacggtcaaactgctgccgatcaggctgtttatatttgtatttgtgatttcaaatgtctgatcaggcatttgcagcgtacgaaaggcggcttttgatgctttcactatgtctttttccgtcatatgcacctgcgacagtgactcaagctgataaatagacggatcttctgaaaaacccataatggtgtctttttcccagtaaaatactgtgcccgaatgttcgtgtttcgtcccttgtgctttcggcgcaatctccacgacaaactgtccgttttcttttctcactgttgtctgaatcccttgtgtttttatttttcggccgtgcgccgacaagaaatccagcgactttttccggtattcctcttctgttaaagtgcggccttccggttttttaagatattggtaatttgtaatcaatcgggaaacctcgtccacttccgcttcataatctttcgttttaaaacggtaaaagtaatggagatcctgattggtttctgttaaataaatcggattctctgccggaaaaaatgatgtaaggatccgttccgcttggtctgaagtgatatgtccaccaacatcctcaacagtatcttcagccattggctttgaaaccgcaaaagcggcatctcccgcattgtataccgggttcaaaaagacaataaaaccagcggccgttgctcccgcaagaaagtttttcgtccgctgtctgatcctgtctgaccgatgaaataaatgatgggtcatcagaaaaccggccatcgttaaatacaccgtaaatgggagaagtctgccgtaatcttttgttacaccggccgagggcgcagcgagcacccacaccaacagcccgatgaccccggcataaaacacggcgataaaaacaggtctcggtttccaatacattttaaagaataaaacattcatagaaatcagcagaagtaaaacaaccgtaataaaacatagcattgaaactatatcctcccccgccatcgcatcgggactgatattccagaaagcgaaaaagctgaagatcagctgaatgacgggcagtgtcaccacagtgagatcaaacgtataaaacatgccctttcccctctgctcctgcggcatgagcatatagtgaaacgcggtgagcagcacatacccatacattaagagatgaacgatcggaagaagctctctttcttccgatatcaaatagtgcgcgctaaagtgagtactctgcacctgatgaaccaattcaactgttatgcccgctaataatacggccctgagcagaattcctgaataaaaccaaactctctcacggctgattttcggatgaaaagtcagcgcgtataaaacagcaagacagacggctgaccactgaatgatcaacacgctctgtctgcttaaaatgaaatacctgtcgaaatgctgaataaaatgactgaaaatctctgacatctgaaacaatccttttcgtttattaaggcctcacccgtttagacaaacggctataaaaaaagttttacagatcggaacatttttcccctatcatttttcccgacttcatttgtcatttttttcagaataaatcgcatcattcgactcatgtctgattcaacacgtgcctctcggcttatcccccgatgctggccgccggaagcctttccgggacgattctatcaattcatcagcggagtctagttttatattgcagaatgagagaatgctggtttattataacaatataagttttcattattttcaaaaagggggatttattgtgggtttaggtaagaaattgtctgttgctgtcgccgcttcctttatgagtttaaccatcagtcttccgggtgttcaggccgctgagaatcctcagcttaaagaaaacctgacgaactttgtgccgaagcattctttggtgcaatctgaattgccttcagtcagtgacaaagcaatcaagcactacttgaaacaaaacggcaaagtcttcaaaggcaacccttctgagagactgaagctgattgaccacacgactgatgatctcggctacaagcatttccgttatgtgcctgtcgttaacggtgtgcctgtgaaagactcacaagtcattattcacgtcgataaatccaacaatgtctatgcgattaacggtgaattaaacaacgatgcttctgccaaaacggcaaacagcaaaaaattatctgcaaatcaggcgctggatcatgcttttaaagcaatcggcaaatcacctgaagccgtctctaacggcaacgttgcaaacaaaaacaaagccgagctgaaagcagcggccacaaaagacggtaaataccgcctcgcctatgatgtaaccatccgctacatcgaaccggaaccagctaactgggaagtaaccgttgatgcggaaacagggaaagtcctgaaaaagcaaaacaaagtggagcatgccgctgcaaccggaacaggtacgactcttaaaggaaaaacggtctcattaaatatttcttctgaaagcggcaaatacgtaatgcgtgatctttctaaacctactggaacgcaaattattacgtacgatctgcaaaaccgacaatataacctgccgggcacgctcgtatcaagcactacgaaccagttcacaacttcttctcagcgcgctgccgttgatgcgcattacaatctcggcaaagtgtacgattatttctatcagacgtttaaacgcaacagctacgacaataaaggcggcaaaatcgtatcttccgttcattacggcagcaaatacaataacgcggcctggatcggcgaccaaatgatttacggtgacggtgacggctcattcttctcgcctctttccggttcaatggacgtaacggcccatgaaatgacacatggtgttacacaggaaacagccaacctgaactatgaaaatcagccgggcgctttaaacgaatccttctctgatgtattcggatacttcaacgatactgaggactgggatatcggtgaagatattacggtcagccagccggctctccgcagtttatccactccgacaaaatacggacagcccgaccattacaaaaattatcgaaaccttccgaacactgatgccggcgactacggcggcgtgcatacaaacagcggaattccgaacaaagccgcttacaacacgattacaaaaatcggcgtgaaaaaagcggagcagatttactatcgcgcactgacggtatatctcactccgtcatcaaactttaaagatgcaaaagcagctttgattcaatcagcgcgggacctttacggctctcaagacgctgcaagcgtagaagcggcctggaatgcggtcggcttgtaaacaagaaaagagaccggagaaatccggtctcttttttatatctgaaacatttcacaatggcttcaccatgatcatatatgtcttttcccgatcgtctttttcaagcttgagctgttcaaagccgcattggcttaaaaacaaaacccatccctgcctgttcaggggaacggctgaaaacattgctttatgctcccctctcagccggcccgcaatctcttcaatgaccgcgcgtccgattcctttctcttttgcctccggagcgacggccacggttccgagccacggttttccgtttgaaggggcccattccaaatgaaaactgacggcggcaggagcgccgtcaatctcccatacgagccacgttccattgtacatggagtatgcaagcataaactccgccgcattttttgttccgaactcttcgtttttccacaccgggtgtgatgccgccagctgctccagaaacccgagatcttcttcttcaaaatctctacctgtcagcatgtaaatagtcgtcaaagataattttatgtattgccggattgcccgcaagcacgctgtggttgtctaaaaacgtaaacggttcgccgtctgtggtcgtgtaaatgcccccgacttcgttcagcagcacgcagccggcagcgtaatcccacggcgcgagcctcatcgtaatgtatgcgtcaatgcggccggcggcaacactggccagctcaagtgccgccgaaccgtaggaacgcgttcctctgacccgttttacgagcggcgccaaaatactcgggtcaatccttctgttttccgtcacccatgtggcattgattgcaataatggcttcttcaatggaagcttcttttaaaggagcaagcggcgtattgttcagataagctccttttccgctgaatgcgtgatacagctcgtcctgcatcacatcataaattaagccgattttgccttttccgtcttcaaagatgccgatggagatcgcgaaatgccgcttttgatggacaaaattcatcgttccgtcaatcggatcaatgatccagacgattccgtcaagggagcggagcttatctccctgcccttcttctccgagaatccggtgtccgggaaaagttccctgtatacggtcaatgaaaaagcgttccgtctctttatcaatatttgtgactaaatcattcggatttgattttgtttcaatcgtcaagctttcctgcatggattgtctgattctcgttccggcttcttttacccatttttttgcgatatcatcaatttccgtccaatttgtcataccgtgtacctcttttctaagtatagcttattctatagcatactgataaaggcgatgaaaaagcaaggaaaatgaaaaaaatgccttctcacgtaaaaacgaaccatttcctgcggttcgtttttactattctttatccgttaagccgaatccattcttttctgagacgttccagttttcttttgctgagatcgatttgatctgcattctctttttgcatggcctcatacagggttgccaattcataatcaacctctagtctccagacagctacacggttatttttttcctccctgaatccttccttcaccacttgcctcattgtctttcgccccttccagagatcatttgttaaaaaagcatcccattttccaatttattaatgatacttcttatatcgtatggaaacttatattcggctgtaacaacattcttaaaattgtgtgtttacctattcgttttttaccaccaatcctcccggctcaaacgttctcaatgtttttgcggccggcggcggctgtggtaaaatatgaatacttacgataaggaggaaaaagatgactcagatgcgttttacaaaagaagacttcgatacatttacaatagaaggtttagatccgcgcatggaggtgttaaaagaacaagtccgtccgaagctgaccttgttaggagagcatttcgcaccgacattgtcagcattgacaggcgatgaaatgttcccgcatgtcgccaagcacgcgagaagatctgtcaacccgccggctgacagctgggttgcctttgccaacagcaaacgcgggtataagaaactccctcactttcagatcggtttatgggacacccatatgtttgtatggtttgccatcatttatgaatctccgataaaagaggaatacggcagattgctggaagcgaagcaggaggacatcacaaaacagattcccggtcattttgtatggtccccggatcatacgaagccaggtgcgtacaagcagtccgacatggatcaggagcagctgaaaacattatttgaacgcctgcagacagtgaaaaaagcagagcttttgtgcggcattcagctgcaaaaagaagacgtgatcaacatgaacaacaatgaattcctgcaaaccattgaagatgcttttaggaagctttcctttttatacacactgactcagaaagtctcataacataaaaagcgggccgattgcggctcgctttgtctacattttgataatcgcttgatctgattgtttcgcctgtttcacagtccgatacggggaataggtgctgtcagcttcaaattggctgcagattttcttttcttccgccttcccgggaacgatttctttaaagcggcggtacgcattcagaagtctgtctcggtcagctcctttttcataggcgttttccacctgctgaaaaaaagcaatgatatccacggcctcctctgtcgtccagtcctcattcatcggatattgatattccaaatgtcttcactcctttataatcatgctcaaaataagcatcttccatagatcataaattgttctttactttctttcaagttcataatataattcatttgttttacgtttaaaaaacgggtaataaaactgaatgtaatacaaactaatccgtaggtattatgataaaggtgggaaaacaattgccgcaacatgaaacacccctgtacagcggactgaaaaagcacgcggacagacagcctgtccaattccacattccgggccataaaaaaggcgcgggaatggatccggaattcagacaatttatcggagaaaacgcgttaagtatagatttaattaatatcgaacctctggatgatttacatgcgccaaagggcatcattaaagaagcccaggatctggccgcggaagcattcggcgcagaccataccttcttttccgtacaagggacgagcggcgccattatgacgatggtcatggccgtatgcggacccggagataaaatcatcatcccgagaaacgttcataaatccattatgtcggccattgtattttccggagcggtgccgatttttatacacccggaaattgacgatgagctcggaatttctcacggcattacgcttgagtccgcagagcgggctttgacggagcaccctgacgcaaaaggcctgcttgtcataaatccgacgtacttcggtgtggcagcggacttgagcagcattgtaaagctcgcgcattctttcgatgtgcctgtgcttgtcgatgaagcgcacggcgtgcatattcattttcatgataagctccctctgtccgccatgcaggcgggcgctgatatggcagccacaagcgtgcacaaattgggaggctccctgacgcagagctccattttaaatgtgagagaaggtcttgtttccaaagaaagagtacagtcgattttaagcatgctgacgacaacgtcaacatcctatctgcttctcgcttcactggatgtcgcaagaaagcgcctcgctacagaaggccgcgatcttcttgaagatacgattctgctggcggatcagacacgggaacgcctcaatcaaattgaaggcatccgctgtgtcggcgaagaaatcacagggtctaaagctgcattcagttatgatccgactaaattaatcatttcggtcaaaaacctcggcctgacgggccatgacgttgaaaaatggctccgcgaatcatataatatcgaagtcgagctgtccgatttgtataatattttatgtatttacacccccggagacagagcggaagatgccgaccgtcttgtaagcgcgcttacagacatttcaaagcaggcttccgacaatgactatgctcatcagcaaaccgaagttctgcttcctgaaattcctctgttagcgatgacgccaagagacgcgttttacgcaaatacggaagtcattccgttaaaagaatccgcgggacggatcatcgcagagtttgtcatggtgtacccgccgggaattccgatctttattccgggtgagatcattactgaagaaaatatcagctacatttttaaaaacttggacgccggccttcctgtgcagggtcccgaagatgcaacgcttgaaatgatcagagtcatcaaagagcaaaaagccatccaataaacataaagaagcccgaaacgaaatcgtttcgggcctttttacgctttttactcttcttcaagatgacactggcattgtccgcagcatgttccgtataacgtcgtgaccttctcatcctcaaagtaatgaatcgcttcgttacagtcttggcaaacaattgtacccatctgtcattccccatttctcagaatttgaaaacgcttaattttcacttgttgttattatattattatgtcacatttaatatgtcaaccgataaattgtataacacatttattttttacggtctttttatagctcgagggtcaatcacagtatatcctttatgacgcaatccttttacaatgtccggcatggcttccgccgtccatttccggtcatgcatcaatatgttggccccgtcccgcagataaggactgttcagtgtgatatcggtaagcgcttttttggattgatatttctgatcccaatcatacccgaaggtccagttcattttcaccataccttctttttttataagtctgtcactgtagtctgtattgcttccgaaaggcgccctgaaaaatgcgggcttctctcctattaccttttcaaccgctttattgacgccaatgatttcttcccgttgtttttgttcggaaagatcttttaagttttgatgagtcattgtatgatttccgatcataaaacctaactcatgaatatgcttaagcgctttcttattttcatcttttttcaaaaaatgtccgttcacaaaaaagatcgctgacgcattgagatcgtgcagtttgtccgcaatctcagcggcatgctgatcaggcgcgtcatcgatcgttaccaatgcgatcggttttttctctttctgttcatccattttttccacagaaaaacttttcggattgatatagtaacggggctccgccttttgtttttcctcttttgtatgatggttttcccgtttggcgtgattggccgcggcttgagaatggggtttgtttgtttgcatcttttcatttgattggcagccggcgagtaagcacatacatatgacggctgcagcggctttatacatgacaatccctcctgatatggttttgcccccagtataacgaaaaaacagcgctctcacgaaaaacaatgtgccttttttacacatcggctgcgcaagttgtcacacgtattatttcttcattaaaaacggtttcaattatataacaattcagtaacaagccttaggtttttcacctctcgtgatacacttgatatagtccttataaatggatgaaccaatatattatataaaacagaggagtaagatagatgcgctaccgtacggtgtttcccttttttttgatgctgttcgttctgtcaagctgttcggtttctactgtcagtccattcacaaaaaaccggatcgacagcattcatcacactcaaatcttgtttttttccgatgaaaatcatatagataaagaagtgccttattacgatgcgatccttgatttagaaaagaaatatccccatcatgtcgatcaaatgaaggtttatgacaacagaaagggatgggaagaggaaatcaacacgttccctgcgctaatggtgatcaatcatcggcatgtggtcatgaagattgagggatccgtaaagaaaaaagaggatatcatcaaacctatgcagcatgtacttgcacaataaaaacagcccccgcttttacaaacgggggctgtttctttgttacattattattttacgatatggatcgggcttccgattgctacttcggcagcttccatagtgatttcgcccaatgtcgggtgagcgtgaattgtcattgcgatatcttcagcagtcattccgccttcgatcgccaggctcaattcagaaatcatgtcagaagcgcttgcgccggcaatttgcgcaccgattacaagaccgtcttctttacgagtgatcagcttcatgaagccgtcagtttcgttaagagacagcgcacgtccgttcgctgcaaacgggaacttagctgcaacgacttcaatgccttcttctttcgcctgtgcttcagtgtaaccgacagaagccagttcaggctcagagaatacaaccgccggaataccgaggtaatcgatttcagccggctctcctgaaatagcttccgcagcaattttaccttcgtaagacgctttgtgagccaatggaggtccgtcaatgatgtcaccgatcgcgtagatgttcggtacgtttgtgcggcactgcttgtctgttttaatgacaccgcggtcagtcatctcgataccgacttgctcaaggccgagctcatcagtgttcggacggcgtccgacagtgattaatacgtaatcagcatcaaccgttttttcttcgccttttacttcgaatgtaactgttacgccgtcaggtctttcctcaacgcctttagccatggcgcttgtatggatttcaacgttgccttttttcttcagtctgcgggtaacgagagaactcatttgtttttcgaagccaggaagaatttcatctccgccttctaaaataaccaattcagttccgaagttcgcatacgctgttccaagctcagtaccgatatatccgccgccgataacaacgagctttttcggaatttctttaagcgcaagtgcgcctgtagagttcagaacgcgttcgctatatttgaagtttggcaattcgatagggcgagaaccggtagcaatgattgcgtttttaaatgtgtatgtttgcgcagagttctcatccattacacggacagagttgctgtctacgaaataagcttccccttttataacgtccactttatttccttttaaaagacctgcaacaccgccggtaagcttatttacaacagaagctttccattcttggacttttgtaaagtcaaccgttacgttctcagcagtgattcccatgtcatctgaatgttttgcattctcgtaacgatggcctgcattgatgagcgcttttgaaggaatacagccgacgttcagacaaacgcctccaagagttgctttttcaacgactgttactttttgtccaagctgagcagcgcggatggcagctacatagccgccgggtcccgcaccaatcacaagagtatctgtttcaatagggaaatctcctactaccataacattacgcctccattaaaataagttgtggatcgttcagtaaacgcttgatgtggtttaacgcattttgtgcagttgctccgtcaatcatacggtggtcaaagctgagagaaagagctaagacaggagcagctacaatttcaccgtcacggacgatcgctttttcagcaatacggccgataccgagaatcgcaacctctgggtggttgataaccggtgtgaaccattggcctccggcagaaccgatatttgtgatcgtgcaagaagcgcctttcatttccgcaggtgcaagcttgccttcacgcgcttttgtagcaaggctgttgatttcatcagagatttcgaaaacggctttacggtcggcatttttcactaccggcacaagcaagcctttttcggtatccgctgcaattccgatgttgaagtaatgtttttggatcacttcatctgttttatcatcaatagatgtgtttaaaacagggaattttttcaaagcggatgttaatgctttgacgacgtaaggcagataagtcagcttgatgccttgatcagcagcaacttgtttgaactgtttgcggtgagcaacaagatttgttacgtcaacttcatccataagagttacgtgcggtgcagtatgcttagagttcaccattgctttcgcgatcgctttacggataccgctcattttttcgcgtgtttcagggaattcgccttcaggagcctgagccgctgcaggtttagctgtttcctgaggtgcagctgtttcttgcggtgccgcttcttgagccgctcctccatttgcaaagctgtcgatatcttcttttacaacacgtccgttattgcctgaacctgttactttacggatatccacgcctttttcacgggcatatttgcgtacggaaggcatcgcgatcacgcgtttgttcggatcagcttccgcttggtcctgctgtcctgcgccggtttcttttgcaggctctttaggagtctcttctttagagatatcctgccctgcttcagcagatgactgaacttgagcttcagttttcgcatctcctgaatcatggcttcctttaaattgaagatcttcgtaaccaggtgcgtcaaacgtaataatcgtttgtccaacagttgcaactgttccctcttcaacttttaattctaatacttttcctttaacaggtgaaggaatttctaccactgctttatcattttgcacttcagccagaacatcgtcttcttctacctcgtcgttcggcttaacaaaccattttacgatttcgccttcgtggataccttccccgatatccggaagtttaaattcaaatgccacagttttcgacctcctagttgattaagcaaattttagttatgcatacgcaagcattgaacctagtaaacagactccttcataataagagaaaaggactctctttaccgtcttttatgatgcctgattaaaattcaagaacttttttcgcagtttcaagaacgtctttatggtttggaagccatacgctctcagcaagcgagaaaggaaatactgtatcaggcgccgcaacacgcagaaccggagcttccaggctcagaatcgcgcggtcattgatttcagctacaacgttggcagcgatgccggcttgtttttgagcttcttgcacgacaattgcgcggcctgttttttcaacagaagcaataatcgtatcaatatcaagcggacttacagttcgaaggtcgataacttcagcagaaacgccttctttttcaagctcttcagcagccttaagcgactcatgaaccatcgcgccgtatgtgatgatagaaaggtcagtaccttcgcgtttcacatcagctttgccaagctcgattgtgtattcctcctcaggaacttcctgacggaaagaacggtaaagtttcatatgctctaagaaaacaaccggatcattgtctctgatagaggcaatcagcagtccttttgcatcgtaaggagtggaagggataacaactttaatacccggctgctgagcgataaggccttccaaactgtcagcgtgaagttcaggtgtatgaacccctccgccgaatggagaacggattgtcaccggagaagtccagcgtccgccggaacggtagcggagacgagccatttgtcctgagattgaatccattacttcatatacgaatccgaagaattggatttccataacaggacggtaatcttgcaggcctaaaccgagagcgagaccgccgataccggattcagcaagcggcgtgtcaaatacgcggtcctcaccgaattctttttgaaggccttcagttgcacggaatacgcctccggcaacgcctacatcttccccgaaaagcagaacgttttcattgtttttcagttctgtgcgtaacgcatcagtgattgcttgaatcattgtcatttgcgccatggcttacttcgactccttcgctttgtaaatttcaagttgttctttcaagttgaacgtcggctcttcaaacatattctcaatcagctctgttactttcggttttgattcgccgtcagcctttttgatagcttgtttgatttcttctttggcctgttcaatcactttgttctcttcttcttcagaccatagtcctttgttttccaagaacttgcggaaacgtacgagcgggtctttttgctcccattcattttctatttctttcgtacggtatttagtcggatcgtcaccggacattgtatgaggtccgtaacggaatgtaagagtttcaatcagagtcggaccttcaccgttaattgcgcgctggcgtgcttctgcggttgcagcataaacggctagtgcatccattccgtctacttgaacacctgtaataccgacggcaactgctttttgggcaattgtctgtgcggatgattgcttttctacaggagttgaaatcgcatagcggttattctgaacaacgaagatcgctggtgctttaaatgctccggcaaagttcattccttcatagaagtcaccttgagaagctccgccgtcaccagtgtaagtaatagctaccgcttttttaccgcgctttttaagacctaaagctacacctgcggtttgaataatttgagcaccaataataatttgaggtgataaagcatttactccctcaggcatctgattacctttaaaatggcctcttgagaacaggaatgcctgatgtaaaggaagaccgtgccaaatcagctgaggaacgtcacgataacccggaaggataaagtcgtcctgttcaagcgcgaagtgtgatgcaatttgagaagcttcctggcccgctgtcggtgcatagaaacctaaacgtccttgacgggaaagagaaattgaacgctggtctaaaatgcggatatacaccattcttctcattaattcctttaactgatcatctgaaagatcaggcattgcgtctttatttacgacttctccttcagcatttaaaatttggaacgtttcaaactgcttatgaatagcatcaaattgttttttgctatcaacaattgaagtttttgtctttgcagccattttttaaaccacctcttcttttgatttaacagggttaggataccgtttagccatccgtattaaaaacagtcttatcatgctctgcaattctaaaattaatcattcagaaattcacatagcgcttaagcaaagataatgacgtttaaactgtactaataaaaaaagattttttattagtacaatatgatcaacaaccatagtttacagtaattaaacaaagccgtcaatcatttataacctcattttgaaaccgcttataaaacttaagatcatattgcgccaaactgtactataaaagactttaaactgtattataaaaatgctctactgtactataattaaaaaaaattacaaagagtaaattaagttatttaacttaggggcgggctttgaaaagatgccgcgggataaaaacgggcaattagcaatcgtcccgcctgccgaacagacgggacgatgcttttgtctaattattcaatacctgcccacacgatattcagcggcgtcagcacggcatgaggatgaaactcggaaatcggagtgaaaaatacatacgtaaaatcttcggctggatcagaaaacatgccgcaccaacccattccaagatgtgagaaggtgccttctgtcatgaaataatggtcaccggccggccacaaattaatgcctaaaccaaagccgccttcctctctgggcgctccgaagaagtaaaaaggaagaccgggctttatttgatttctcagcatagcctcgactgtttttcttccaagcagcttcttatctttcaatctgcctttatttctaaacatttcagccaacttccaaatatctcgcaacgaagagtacagaccgcttgtcgctttattcggaaaatacgggtgatgacttttttccagctgtacgcactcgtgctcattgatcacacaaacttcttcttttaaagcatcaggcacataaaaatacgttctttctaatcctagcgcttcaataatatgctttgttacatactgttcgtagggtacgcctgttacttttgaaataatgatgccaagtataacaaaaccggttctggaatagttccatgcttcatccactccgtactccaaaggcgtactgacgagatagtttatccattcttcctcattcgttaagtcaatgccttcagccttttgaatatccagctcaaaacttaatcccgccgtatgagtcaaaaggtgcaaaattttaatttctccgaaacccggtttatcaaacgcaggcaaaatgagcttgaccggcattttcagatcgagcaaacctttttcgacgagctgcatgacggctacagcggtaaacacttttgtcaaagaaccgatttctctgattgtatcaagctgaaatgtttgcttttctttttgtccgccggtaaattcccctaacgactcagctgcaaaaacctcacctcctcttgacatcatataactcgcacattgcagaactccattgtctatcatcgtctgataatggctgttaagagcgttaatttgttttatatcaaatgccggattgctcattgtttgtttcattgttttctccccctgtactgtatgtatcgttttcatcctttacttaccgatttcttgatgaattctgacaccgctttattaaattcttccggatgtgtgatgttcggaagatgccccgctcccttaattttctttaattctgcattgctcagcagtttccgcagcctttttgtttctttctgatcaactacgctttccttctcacctgtaaggataagcgttcttgtatgaatgtcttttaaaaagccgattgtagaatagccttcttgttgatgtatcttcataaaacgttcaatagaagcatttaagaattgattactgtataaactttcatattcatgcgactttcctatagctataaaatcatttttcagtttttcctcgacactgctttcagggtcttcttcgtattcggtgtaacttccggaaagaatgagtgtttttactttttcagggtattcataggctatcctctgccctatcatgcctccccaagaagctgccgcaatgtggatcggccaagcaacccctaactcgttcagcacttcgataaaagtctgagccagcccgctcagtgtaaaatcggtgctcccctcactcagcccgtaacccggtgtgtgtatgacaatgacattaaattgatctgcccactccttcatttgttctttccacatgtaagcagtggtagcaaaaccgcaaatcagtaaaattgtttcacccttaccgctcatcaatatttccatatgccgggcattttctgtgtttgccagaaaatgaacggtttccgtttcttctgcctggtaaaaagcgatgagtttttttgcggcatcgctttgatcgtgctgaagggctcctttcttcagtctgctccaataatgcaaataatcgtctagatgacgattggaggccgtgccgagtattcggaaaggactttcagcttcttccgtaacgaacgacgaagcatcaaaatcggctgcaatcgctgaatctcttactagaggcggtgctgaacgggcggataacggcttgaaatcgttttgtattttttctttttctccgtataacacgatcagctggtggccttggccgagaagcgagtgttcaaacgctttgattccggcagtattttccaatgggtgaagtccgtactcccttttcataatatcttgaatgccgggatcaactgacatgcctccgtctttccagaaaggccaatttacagcgatggtttttcctgatcttccccccgcctttctcatacattccctccactcggcaaaatgctccagaaaacgattggcgtaggcgtaatcggcttgacccagacttccgatttctgaggagatggaagaaaacaaaacaaaaaagtctaaaggcatatctctgaacgcttcatccaaatgaatcacaccattgacctttgattgcagcaccgcttgagcttccgcgtctgttttattcataatgagagagtcttttaacacgcctgcactgtaaatgaccccgttgatttcggaataatcagcatgaattttttccgctaacttgatgacctgctgcttatctgacatgtcagcctggatataagaaatgcttgccccgtcatatcggatgctgtctaatttttcttccatgtctgctgtcattttcgatcgcccggcaatgataacgctggctccgtgatttgcataaagaaacgctgaaataatccagccgatgccgcttaaccctccgatgatgagatacaccccgttttttgcaaactttgcggccttttgccctggttgcagcgaagcgtctttatatgctgtcacccaccttttttgatcgccgtcatatttcacagcctgatgatgtccggcacttaattcattgagaagcaaaggtgctttttcaatggtttgtcttgaagaaatctcaaccattttacactttatattcggctgctccgcattcagcgttttaaaaaagcctccaatcgcggcgtaaaccggatttgtatattgacccttgtcatgtacgtacagaatgttgatgttttcttttactttttgatggatcaaagctttactcaaataaaggattgaataaaagctgtgagtcagatctaacgctgcttcagtataagctttttttgacaggtaatgaatgattgacgccggaaacgctccggactttttcatatcttccaacagtctggagtaatgagaagactgctccggattaaatttataatgcttttcatttaccatttcatattcagcggcggcttccgcataaataacattttcactgccgatgtactttcggatttcatcactcaatgaactgtcgaaatcgaaaatcaatgtattttccttaggtacttctccggactttaatggcgattctatccattctttttgtaaatacaaagattcaagcatcgacttttcagacggctctttcgtttgcgttttttctttaaaagctgcggccggcgtattacgcacatcatatttttcttctaaataagccgctaaatcatgaatattgttataatcaaaaagcaatgtcggatacaattgtgtatccaatctttcctcgagcattttcgatatatgcagcagctgttttgagtcaagacccagttcgtaaaaagattggtgtttgtccgctttatttggcggtgtgtttgtaacctctccaataatggatgacagctcatctgtcaatgttttatgactttcttggtgcaaaactgtaacagagatagagtctgtaatgtcggctccgtatttctcctgcagatattccgtcaattcaccgattgtggagtaatcaaataataaagtcgggtacagctttgtatctaacatcagttctaattttttggataagtctaataattgtttagaatccaagcccatctcgtaaaaggaaatatcattcttcactgtttcagcaggtttttcaatcatgccggctatctcttggatcaaattatttctgatcatttctttattgttcgttgcgctgccgacctctttagctttttgggaatgctccagcctttgtattgatttttcatttctgactcttttcacaccgaatcgctcataataaaaagcaagctctccatcaggcctgtatacttctatgtccgcatataaaatgtctttagaaggcggctgcgttatactgtttttatcaatatacacaaaacaagacccagttgttttatgcagtgcccggaacgtctcaatatatatagggataaacgcatttgttccttcatccggcaaatctgatgtaaggattcccaacaagctgagagacccatccaaaaatgcgggatgcatgtaaaagtcatctgtatattcttttgaaagtccgcttaaactgacctctcccagaatataattttcaccttcatatactgtaccttccaatttcataaaatctttatgaatcaggccgcccctgcgcaaattacgataggcggcttcagcctccgaagtccggacggcccctttctttaatgcttcgattgaaattgtcttttcgtttatcgcattttttcttatgatttccgcctgcaagttaactgacgcttcaccttccgccttttcagcgacccaattcctgcttgttgtttcaacaagccagccgttttcttgttgcgtaaactggaagctgacttttttatcaaaatggactgacgtcgcaacaggttcacggaataaaacatgtttgatttcaaaacttcggggtgatatccctttctcagctaaaaatcgggttattaaatccagatacgttacgccgggtatcgtacgcacttgatgaaggacatggtctgaaacaatataatcgtcatgtttgactaatacgctgaacctcatgcaactcgacaacctttcttcttttacaaagtaaagaaacagagcaggtgctactctgtttcatcaataatttcaagaagccgttttttattttgtttgatttgttttttccgatttgaatccggccagtactcttttctgacaaactcggcaggcggcagcggagttctgacggaatgatatgaatcatccaggccgcttaccaaaaggtgggcgtttgttccgccaaaaccgaaagcgctgatgcccgccctccgttttccatccttccagcttcttagctctgtattcggataaaaaggcgacttttcaaattcaaagcggggatttggcgtttcacaattcaatgtaggcggaatttccttatgccatattgataaaatcactttaatgaaacttgccgctccggcagcgcttaataggtgtccgatattggtttttacacttcctactccgcaaaattgcgttttgtttgtgtctcttcggaatacttttgtcagagcctgaagctcaatcggatctccaatcatcgtgcctgtgccgtgagtttcgacgtagctgactgatccgggagtgatatcggctttttcaaatgcatcttgaataacctgctcttgaagcttaggattcggggtcgtaattcccattgtcgcaccgtcgttattaatagctgatgcttcaatgataccgtatatccgatctccgtctgcttttgctttctccagcggttttaacagaacagcgccaaaaccctctccgggtacaaagccgtttgccctttcatcaaaagtaaaacactgaccgtccggcgaaagagctcctccttctgttaacatcaggtaaggaatttcatccaaaagcagatccgcccctcctgccagcgccatctctgaatcaccgttttttatgctttggcaggctaaatgaatgctgactaatgaagaagaacaagcggtatcagaaaccatgcttggaccgtgaaaattaaagaaatgcgacacatgtgaagcaataaagttttgactaagcccgacgatgtggctgctgctttctttcggcagtttgtgaccgtagccgcccattctggaaccgacaaatacgccgactttttttcccgataattccgtttcttcataaccggcatcccgtacagtctgtacactcgtttctaagaaatgtcttatcagcgggtccgtttggatggctttctcctcttccatgcggaaatactccggatcgaagctgccgattccattgataaatcctccccatttgctgatgctttttcccttttgctgcaccggagagtaattttcttctatattccaccgggaatcaggtacttctttaatatgattcttcccttttctcagattgtcccaaaattcctctttatcagccgctccagggaacttacatccgattccgataacagctatctttgcagaggaagccgtctgaagttctgtatttcggctcgtcacagactgcatatcttgctgattgctgctttgagaatcagtctgttcgatttgttttttcaacggcggcgccgtcttaccgatatattccgcaagaccatgaatcgtgttgtgttcaagaagcacagtagggtcaatttttttctgaatcattgcttctatacgatgtataatgctgacaagaagtatagaatccacaccgtattcctgaaaatccgtatttgggttaagcttttcaaggggaatgctcaattcctcggcaaatacggcagaaagttcactgacaagcccttctgaatgatcaaaagtgtcgggagtctcctgtcttcggactggaaccgaagctccgccggttttattgatgttcaggagactgtctgcatgaaacactgttccttttttcacgataggaatgatattggccgattttctctccagtgcatgatacaaaatcgccagtccttcccgtgtggaaagagagtccaatcccaattcatcatataaaggactcgtcacagtacccattccgacttctttccagctcggccaattgatggacgtgaaatacgttctccccttttgaaaatgataagccgcgaaatagtccatatatgcgtttgcagacgcgtaatcagtcattcctttcgacagtttgggtgactgtgcagcaattgatgaaaatagaataaagaaatccagcggcctattattaaaaatccgctccaaattctgaagtccagtgactttcggcccgtacaccgtcttaaattcactcattcttttatgaataaaggccggatttccgccgctgtgcagtccggcacagtgtatgacaccgcttatatctttaaattcaaggcttacttggtgaaagaatgaacgcagcttctcttcatttgtgagagaaccgctgtaatacagatagttgacacctttctcttcaaaactttgaaacagtttgatattgctgactgtcttttcgtcctgtctgccctctttcagcaaatgatcccattcacttcgcaaaggtaatggacgcgtacccgtcagcacgagttttttcactccccgtttcaccaaatcttcagctattgctctgccaatgccccctgtcgcgccggtaatcacgatggctttatccgcaggaaatgaaacaggctcgccggtatggattctttcttcttcaaaatacggaacatatctgacgccgctgcggtagcatacttcattctctccggtacattgcgccctttcattctcaaagatttgtttcagctcatgcgtttctttcatgctgtctatatctattgttttcacatgaacaaagccgtattccgcagaaagggctttcagaaaagccgctgattctgcccccgtcagctttggtttttccgctttaaatacctgcaagccattggtgatttgtaaaatggataatggtgtttcctttttactcctcttaattatttcttgtataaataagaatttaccatatgggatgccgttctgattttcactctggtttccgatatctgagaaatcaaatatattttcgacctgccgctcaccgcccgagaagatctcacggataacgtcgtatgcgtggttttcatctaataaagaacactcaaacatttgatcagagtgttttataaatgaagagtgatgttttatgacaatcagattctcctgatctatatccgaacaaatggtgcgggcaattgattctgtgtcttgatttacaaatgctactgtcagtccgtattcttttgtttcggatggatttacaaacggattctctctccattttttttgcaagtgatgttgaaaagaatgctgagggatctctgccttctcagtcctggacggaacccaataacgttctttcgcaaacggataagtcggaattgagatccgtttacccggctgctgtaaatgttgatgaacggatttccagtcgatatccgccccccaaacccataattgagccagcttttccgcttcaccggtctcaataatggtctttacaaacaattcacctgctctgccttccgttaacgccttcattttttcggcaaatgcatctgctgattgctgattaacatatacgcctgaaacttgcttgtcaccgcggcaaaactcaaataatttatccttaatttctttaagggaggtaccggtaatcgccgctctggcctccatcgcttctctgcccgattgtgtagtgtatgccagatcccgtaaaacgacgctttccgattggccggcttccatcacttcattcgggaacatgtttcttatcgctccggcatattccttcaataagtattcagtaaccgcttgaatggaggggcaatcagttaattcatacatcgtgagttcaatatgaaacatttcgttaataaaatccgccatccggcttaattccaaaggtcctacgccaaattcactcaggtgatcagcaatattaatttcttccggatggatatgaagcaattccgaaacaaacggtttgagtacttcattcaccttttctttcatatcaggctgtttatcctttacttcagaacttagtgaacgttggataaaatctctcatgttttcggcatactcaagaagacgttcattgtctttggcagataacaggacaatatgcggttcgttctcaacatgttctgttgaggcgtttgtttcttcatattcttctataatgatatgaacattcgttcctcccgctccgaatgagctgatccccgctcttctcggaacagttactgtttttccgttttcctgcagtttcggtttcttccagtcttgcaatgaccgctgtacataaaaaggagatgctttaaaatcaatatttggattcagcgtctccgcatgtatggaaggaaacagttttttcagtttcatttgcaaaagaacctttgtcaaaccggcaattcccgctgcggcctcaagatggccgatatttgatttgacagaaccgattgaacaatattgagtgtgctccgtaaattcccgaaacgcttttgttaacccggtgatctcaatcgggtctcccagagcagttcccgttccgtgagcttcaatataactaattgtacgagggtcaatacaagctttctcaagcgcgtcctgtatcagttcagactgaccattcggattaggaaccgtaaaaccgtttgttctccctccgtgattgaccgctgtcgctttaatcagcgcataaatatgatctccgtcccttaccgcttccgccgccggctttaaaagtacggatcccactccttctcccggtacataaccgtcaccgccctcgccgaatgtacggcatcggccatcacttgcaaagaagcggctttgatttaataatgtatatttattcggatgaagcgtaagattgaccccgcccgcaacagcaagtgtgctttctcctcttcgtatactttcacaggctaagtgaatggcgttaagagaggatgaacacattgtatcaaccgccatactcggccccttaaagttaaagaaatacgatattctgtttgctattgcagaaaatggagacccgacggccagttcatttcctttaagtgattcttcaacgccgaaaaattgatagcttccatatgtgacgcctgcaaaaactccgacctttttgcgggtcagatctgaaggtttataacccgcatcctctatggtattgtacactgtctctaaaaagagacgttcctgaggatcaagaaaagccgcttctttcggtgatatccggaaaaataaaggatcaaaccgatctggatttttcagaaaacctccccacttatagcagcttccctccagcttttccttccggtcatcaggaatttcgcttacgcaatcctgtccattcatcagcacattttggaactccctgatgttttccgcacccgggtatctgccgctgacaccgataatggctatatcagcagaaaggggatcggccgcaatgtgctcttttgaatcttcttcttcagagcgtaccggcgcttttgtttccactggttttcttttttgctttttttgatatgagacaagttcaggtgtgccggccgggttcagcagtttcatcattcgttcgctgtgatgactcaggaaatattcggctaactgcgatattgaatgatattcaaaaaacaatgttttcgacaatctgccgatactttgctccagctttttggtcagacgcatgatcatcactgaatcaatgccgtatttctccaggtattgtttttcatctatgagtgagaccggtaatttcaattcctctgacattatatttttcagataactgatgatattttgtcttaattcatcgtttttcaaatcagcatcttcctgctggtctgaatgtaagctgattgtgccggtacgcttcagcacatcctcaatcttttcttttcggcctttcagggcaatcagctgttcagatgattgacacaagctgttctccagggcctgtattccgtcaccgtcatctaacgggtcaagaccgagttcctgtttcatgtaggatattccttcatcgtcaatattcatcccgccggaagtccatagcggccaattgactgacactacccttccggcagactcttttgcggtcataactgctgcatactgatccaaacaggcattggcgaaagcatagtcacattggccggctgagccgaagactgccgatgtggatgaaaacaagacaagtaattcaactttcatttttttgatttcttccgccagccacaacgtgccaaaaactttcgaacctgtgacttgatcaatttcttcttttgtctttcttaagataaaagagtcacggagtacgccggcactgtgaaatactccatgtaaggtgccgaactgctcttttgcaaaagcaaacatccgttcagcatcactttgttttgaaacatcagatcggatatattcaactgttgaacctgaacttcttaaatattcgatctttttctcctgctcttcagttaaatcagagcgccccgtcaatatgagattcgctttccatttttccgacagatgttttgccaatatataaccgagaccgcccaggcctcctgtaatcagataattcccatgatgtttcagcggctgggttaaatcgaatgagccggctttattatagcttttcgtaaaacgtctgccgtttccatagcgcacttcaaaatggatatcccgtttttcgtcacactctctctgatatatatccgctattgctggaagagcggctcccgcaccctctgattgcgtgatattgataatctgatagtgaaaattgggatgttcctggtgaacggttttcaccaatccgccgagagcatgatgcagcggcagttgttctttattctcggtttgaaaaatatgcgtcagctttattatctttttccattttagttcaatcagcgcctgtgtaatatacagaagagaaaacaatccgttttccaattgtttctgtatacctcccttactcatgtcagcctgagaatcagaccacaagtgaagaatcttttcgggcagctgataatgatcatggatgtatcggaacagctttagatagtcgtcttttttcacgtggttcatacaaatcgtatcatcatgtaaaacagcaaattcttttccgcggataacaaacaagagagtacagtccttaaacaaaccgctcaattcttgtatttgccgttcattttctgcaaaaatcaggagcaatcccgtcaagggtacgctcttcttattcggaatgaacgattctgtccattccggcttgtaataaaaaagcggatggttcgatgcccgtgatttttgattctgaatggatgtcacacgggcatagccttcgtcagccgatatctgtcctgattgaatcagatcaagaatatcgctgatttgttcacgttttccgttcatcattcttcccccattaattgtttcaatacagccttctgatcaatatcattggtttccaattgacgcaggagacgaatgagttcgtcgtccgtctgaacagttccttttttatgaccatatctgaatctcacatctctgcactctgccagaatgcttccgttttcatctgtaaatgtcatatgacacgttacatcacggctgttctgccggttctctttttgagtatagacataaaaattttgagcgagaggctgatagacatccgcttctcccattccgatcaattccggaaaggtttctccgctgacaaaaaacgcactggcttgaattgcggactcaagcgcttcaggagagatcataaaattctctctttttgcataaagctcgtccggcaatgaatgaagcgacagcattccgtcactgtttttcgctgattcaatgacaaaaggcgattcagcaggatgttcagtcatttctgatttgacttcagcaatatcaagcgcttcaggaagcataccgctttcaggcttaacaatatgcgcatttcccctggcaagacgtactttattctcatgttttgtgtttgcatatatgtcaaaccgcgcaaagccgcgctcaggcgtcagcgtaatcatcagttcccgtatatcagtcattccgttcatgctttcggtccacaataaatcagtcaatgtatgaactggttgtccaaatgccgccgctgcattgacgatagccatttcagccaaagatgcataagggaaaaaggacacgtttccttcagacagacttagtgcgaacggatgattacggctgatttttttcgtgaagctgaactgattaaaatcggacgtgttactccccaagaaagggtgagtcggcttactcacatctgttgaaacaagcgtttcccctttttccgctatccaataccgctgtttgatcagcggttgtcccggaatagaaatcctgcgagcattccgattcacctcaaaagtctcccaatctatctttcttccatttacccatttggatgctgcttcggcgtaatctgaacaaacgtgaggcatttcattgtgaacttctgattcgaatgtattaccggtatagctcaagctgcttttttcacccctgatataagctgagagctcttcagcaatgacctgcccggaatctgccactatcgccagccgttcttccatatgatcgcgtcccgtctgaagtgtataggcaatatcctgaagacgcagtttatgattgttatccttcgattcattttctgataggaaatcagccataaccttcgcatactttatcagccgttgtttgtcttgagccgataaaacaaagatcactcggccgctttgatgatcaaaagcttttggcggctcatacgcttccaatataagatgcgcgtttgtccctcctgccccaaaagcgcttaccccggctctcaaaggatgaacagcattgctgttttgcggaatattccattcagccgctttccgctgcacttgaaaaggaacctgcttaaaatctataaacggattaacaatatcggaatgcagagaaggaacaagctgcttattcttcatttggagaagcactttcgttaccgcagcgattcctgccgcagattctaaatgtccgatatttgatttcaccgaaccgatggcgcaaggatgattcagttgataggaatctttcagtccttgaatttcaatcggatcgcctaatgacgtacccgttccatgcgcttcaatataattgacggtattcggatcaatgtcagctttacgaagcgcttctgaaatgacctccgcctgcgcatccggattcggtatggaatacccgctcgtctttcctccgtgattaacggcgcttcccttaatcacaccgtatatttgatcttgatcttctattgcttttttcaatggttttaacaatacggctccgactccctcaccgggaacataaccgcttccgtcttttccaaaactccggcatctgccgtcacttgatagaaactgccccatgctgaggaacttatatttattcggatgtattgacaaattcactccgccggctaatgccatatcgctctctccgcaatgtatgctttggcatgcgtaatgaatagaggtcagtgatgaagagcacattgtatccagagccaaactcggaccttttaaatgaaaataataagacacccgattggcaattgaagaatagacggatgccggcgagaaagccactccattttcttctccttcaaataattgatattggccccacattgcaccgacaaatacaccgactttcatcttttccagcatgtttctcgggtaccctgagtcttcaaaacaatttttggccgtttctaaaaagagcctttcctggggatccataagttctgcttcccttggggaaatatgaaagaaaagcggatcaaattgatcggctccgctgataaaacctccccacttgctgtaagacttccctttcatatctctgtcttcgctgaagaaatcatccatattccagcggtcaggcgggatttctgtaatacaatcttttccgttctttaaattctcccaaaattcaggtaagtcttcagccatcggatacttcccgcttaatccgataatggcaatgtcctcatgccttgtatcagctgtttcatttatttggatctcacggttttcatcctccatgaaggtatcttgaagtgcagatttcaatttttctttgtcaccttcaaacacgatcagctgtgatgcgttcagagagagtgaatcttgaaaagctttgatcccattggttttactaagaggaaccataccgattttttgtttcatccatttttcagtttgtttatccactttcatgccgccgtcttcccatagcggccagccgatggctactgagacgccggagcgttcttttttccgcctcattccttcacgccactcagcgaaaagatcgatgaaccggttggccaatgcgtaatccgtctgtccgatattcccgtacatcgaggtgcttgatgaaaacatcacaaagaagtccaaaggttcggtttgcagcaagctgtccaataagaccgtcccatttattttcggagcgatcacttcctgaatttcatcttttgatttttgaatcaataaagcgtcgtgcgtcacaccggcactgtgtatcacaccgttgatttctccgaattgccttttaatggtttttatgattcgctctgcatcgcggctatctgaaaaatcacctcttatatattgaaccgaagaaccgcttgctttcattcggctgattttgttctttttgtcttccgtaagttcagaacggcccgctaaaataatattggcttttgtttgggctgcgatatgttctgcaaatataaggcctaagccgccggaccctcctgtaatcatgtatactccgttttctttaaaggagaaacctgagttttgatccggttccgcttcccgtaaggcacggacccagcgcacatttccttcataataaagatcggtttctcccggatgcgcttcagttgattcgcatctgatgatttcagctgtgagatccggcaacgatgacttgtctgaaactgatatcccgattgtcttaagggccagtttcgggttctcaagcaaaatagactgccctgcgccatggactgaagcgtaaagcggctgatcatttttatggtccgccggataaaggaaaagcgatacaacctttttttccgccttgctgcgcatcaatgcccggctgaaaaagaatagcgggtaagcccctttagaaagctgttcatttattttttccgggccggcaaatgacccttccggccacccgtaaaccgcggtgtcgggcatttgccccctttttttcagatcagctgcaagcctgtcaaagtgagcttcctccctgtgatctatctcataaacaccgtctccgtgataggagaaacgattccctgataaaacgaggatgatctgtgtattttcgaatccattttcagcattttcccgcataaaatgaaaaagctctctgtcatattgaaacagcaggtatgttcttttctttttatttccgcaattcgggtcccacgcggcagccttttgtctccaatgcggcgttaaataggtcagagccgtatgattctctccatgatgaagagggaggtctttttcaacggacgtcttttcgccgctctctgcaaaatagtttgcaagtttttgaatcgtcggatactcaaacaataaagtagggtacagttccctgcctgttttctcttccaatgcctttacggcttgcataagtgttacggaatcgaggccttgttcataaaaaccttttacgacagagagtgtttcaggggcagtccctttgacatctgcgatcagctgctgaatgtctccttctgtgataagagcggaaagattttcgttcttactttctttcatgtcaggcttttcagccggttgatttcgcgttaagaaataactggacattctttgattttctttaatatacgcggcgagttcccggatcgttttctgctcaaacaggagtgtaggatacagctgttcccctgttttgttttcaagttctttgacaatggcaagcaaagaagctgaatccaggccctgttcataaaaaccaatgtctgtccttatgtcacgcagatctatatttgaaaccccggatattaattctttaaggtgtgtctcgatgctttcgcttcgatttatgattgaatcttttctgatcaggctgtcttttggctgagtagccgcttcagtttccaaacgagtctgcttcaggttttcaattaaatcttttgagcgaatatgtttcacagacagccgcgtaaaataagcgatcatctccccgtgtgcatcgtacaaaccgtaacttacttggatgacatcccctgaatcatgattttggtcttgcttctctatgtacacataacacctgtcttccaggcgcttcgtcatacggaaagattcaatatgtatgggaatatacgttttcatccggcttgccggagatccttgtgtaaaatattcgggacatgcctgataaaggatcgatatgatggtagacgcatcaagaaaagtgggatgcaattgaaaatagccggtatattgattggcaatttggctgagcgttaactctgcaagtacagaatgatcagacgcataaaccttccccagactcttcataaattcaaaatgctctatatcaaccttttttaaatagtcataacatatctccatatcagcttcacgggcggaggcatgtttaatttcatcaatattgattgaactcatgctttccggaattttcggcatgagcctgcagttcatattctcatcccagctttcatccagaatgcggtcatcttttacctttctgctcttcgcctgaatttcccatccctgttccaatccctgaaaacggatgcgaatttctctgtcaaaggtatccgatgttgctacaggttccaaatacaaaatattctgacactcgagttcttcaataggcaaacctttgctcagcgccatacggtatatcatatctaaaaatgtgacaccgggtataatccgggtgccatgcacccggtgatccctgacaatatagtccgtatgtttaattgttaatgtgaactgatagttttgattactggccacctgtctcattccttttcttttctttataattctttgaaatcaagtaaaggaatcagcaattctgactcttccttttctggagtttctccattgtcgatccagcattgttccttattgaatataatcggagaaagcgggtgtctttttgtctctccatatcctaatgtgagatggctgtcgctcaatatcatatgtgcgttcgtgcccccgaatccaaaagagctgattccggctctcaaaaccccttttctgggacgccattcttttaaagacgtgttcggaaagaatggcgactgatcaaatttaaaacgcggatttggcgttttacaatgtaatgtcggcgggagcatctgattttttatggataaggcaacctttataatactcgctatccccgctgcgctcattaaatgtccgaaattcgtttttacgctgcccactccgcaaaattgcgtttcttccgtaacctcccggaacacttctgtcagcgcttttaattcaatcggatctcctatcatcgtaccggtgccatgcgtctcgacataactgagagtatctgcatcaattccgccttttttcagggctttttttatcactgcgctttgcgctttcggattaggtgttgtcattcccattgtctgtccgtcattattaaccgcggatgagtcaattaccgcgtaaattctgtcaccttcggcaagagcgtcatcaagccttttcaaaaggactgcgccgcatccctctcccggtacaaatccatctgccttctcatcaaatgtatgacactttccttcaggtgaaagcgcccgagcctcactcagcatgacgtaaggcttttgatccagcaaaatgtcaaccccgcccgcaatcgccatatctgactcttttgacatcaggctttgacaagcgagatggacgctgaccaatgaagaagaacaagccgtgtctacaaccagattcggtcctttcagattaaaaaagtgtgagatatgcgcacctatgaaattttgtcctatacccacgatcgtattttttgaaggggaacctatttttgacataaacgtcccggtccgcgaaccgatgaagacgccgacttctttgtttgatacttcttcttttgtatagccgccgtctctcaatgtctggacgctgacctcaaggcattttttgattaacggatcaagctctgatgcctcacttttgttcatattaaaaaacgcgggatcgaaagactcaatatcttgaagaaatccgccccacttactgatactttttcccttttcataggtgtcagagtagtatgaagaaatatcccatcgcgacgtcgggacttcgcggacactattttgtcctttcttcaaatttctccagaacgtttctgtgtccggagcatccggaaactcacagcccattccgataatagcgatttggttcagactggtttgttgcatttgagatccgctgtcccgtacttcagaagcattttgatttatatgttgctcttttttccgaatctcaatgttttctgaatcaatttgaggactgatcccctcacttgcaaataattcgtttatatagacgcccagttgtgaaaaactcggatactccagaaaagctgatggttcaatttttatttgaaatgcatcttccgcttttttgacaagctgaaccagtaagattgaatcaactccgtattccgcaaaagacgtatcctgatctaaattctcgtaaggtattttcagctccgtggaaaaaatcttcattaacttcctaatcatagcttcattgtctccctgaccagagatctctttttcttcagcatccggcttatttatagcagcttgaattcttgtctgaagcagctgctccagcttgaatttctccggatgtgtctttgccggtataaggcaggggtatccgtttatcgtcatcatttcatccagcatggcaatacctgtttctgttgagtgtgaaagtaaaccaagcgcctgatatgatggacttgtcacctcgcccatcccaatgtccctccagctcggccagttaattgattgataatatgttctgccggctgcatgctgatacgccgcaaagtaatccataaaagcgttcgctgcggcatagtcacttgttccggcgcctaataaaggaaaggcgctcgcaacagatgaaaacaaaatgaagaaatcaagtttgtcatcaataaaaatgtcatgaagtacctgcatcccctgtacctttggctcaaatacttctcttatttcttgatcagatttatgaataaaagccggattcgaatgattggctgcaccagcgcaatgaatgaccccgccgattttgccgaacttcagtctcacctcagaaaagaagcgttgtaatttttctttttccgtgagcggcccggaatacacttccacctgaactcccttttgatccaactcatgcagcagttgtaatttcgaataaagaggtgacttttcatcggtgtcttttaacatgccggctattttatcagattccggaaggtcggttactcccatcagcacaagttttttgactcccttgccggcataatgtctggcaagttctgctccgatccctcttgttccccctgtaataaccagggtttgatccgtacggcataccggcaggccggatagtttccggtttatttccgctgcatgtaatttctcgacgtatggaatataacgttcaccgttccggtagcagatttcactatacagcccgtcaacgcaagcttcatctgtgattacctgtctcaattccgccgcagtcccgacatgcccgtctacatctattgtttttgattttatcttttgatactccgcactcagcattttatatagtccggctgtttcggctccggctaacgacggcttgtcattcagaaatgtctgcagccctctggtcacatgtaaaacgaaaagctgtttacgtgtgtttatgatttcctgcagcagtgtcagcttcccgattgtgccggtgtgtgccccgttttgatcactccgcaaatctgacaggtcaatcatgccgatgatttccggattttcttctatgactgctagagccgtttttttggcttccccattcgaatgatcccagttatctgcgcaaatgacagcgggttcaatcagaggatctgaatcaaacaattcgaatgcaagccgctcactttcactattagccaggatcatcacctgtcctttcgtaaaagcggaaggcgcagccttttgttttttccacgatttttttaatacatcaaatgataagtcaatcggtgtatggggcagactttgcggtacacctgtttttttctgtttctgtgctgcttttgcggcaggcacccaatatctgttccgttcaaaaggatatacaggaagagagataagcttcggtaattccgcagtgtacatctcttcccattcaacgtctcctccgttcacccagtgaatggccatatctcttgcattttcaaagtgagcggctgacagggcacccttttgaccagcgcctcggcgggcctttcccctatataaaccgtttaccttctgatctgaccgcaaatacatcgtcagcttattgcgaagatcgtcaatgctgctaacctcaacagcgagccgctcttccatagcgtttctcccggtctgcgaagtgtacgcagcatcggctagtgacgtgtttggctccagttcttttatatatgcatcaatcaagagtctgagccgttcttcatttttggcagaaagcagaataatttgcgtcttgttgctctgtaccgtttccatcttttcttcattcttatactcttcgatgataatgtgagcattagatcctccagcgccgaaagaactgatgcctgaccttctggcttgattttgcggcgtctcccaatcggtcagttcagactgcacgtaaaacggagtttccccaaaatcaatattaggatttaagttatcggaatgaagggaaggagcaagctgtttatatttcatttgcatcagcacttttgtgatagaagcaattcccgccgcagcctctaggtgtccgatatttgacttaaccgaaccaattgcacaacgataatcgcttttcgagctgtgcaaagctttggttaaacctgaaatttcaatcgggtctcccaaagatgttccggtgccatgcgcttcaatataacttatgctgtctgcatcaatccccgccttatcaagagtttcactgatgacgtttgcctgctcgcccggatttggcacagtgtatccgtttgtttttccgccgtgatttacagatgttcccttaatcacaccgtaaatcctgtccccgtcagcctttgcggcagaaagcggtttcaaaagaacggccccgactccttctcccggcacatatccgtctcctcccgttccaaagcttctgcagcgcccatcgcttgaaacaaaatggttttgtgaaagcaaagtatatttatccgggtgtaaggataaattcactcctccggctatagcgagggtggattctcccctttttaaactttcacatgcaaaatgaacagcagaaagtgaagaagaacacattgtatcaattgcaaggctgggtccgtgcaggtcaaagaaatatgacacccggtttgcgatagacgaataagaagacaggagcgcctgacgttcctcatcatctgaagcaccggctgcaaataactgatagtggctgtaggtgacaccgacaaatacacctgtcttatgccgtttcaactttttctttgtgtaacccgcatcttcaaacgtgtgccacgctgtctctaaaaataaccgttcctgaggatcaattaactcggcatcacggggcgaaattgagaagaacagcggatcgaatttatcagcgtcttttataaaacctccccatttgctgtcatgacgggcattgtcacctgtgtgataatatttccgaaaatcccagcgctctttcggtatttccgttatacaatcttttccggaagaaatattttcccaaaactgttccacatccttcgccatcgggtagcggccggctataccgataattgcaatatcttcctcggaaggtgcggatggtatgcgggaaacggaaagcttctctcgtttcgccggcgccgaatgatcaattcgctgttcggctgccggtaaaaacgccttcttcaactcatgatgatagtgttcaagaaaatactctgacagctcttcaacactgctgtattcaaagaaaagagtcttagacactcttccaaaatatttttccagacgggagttaagacctaaaatcgttagagaatcaattccgtaacggtcaaatgtatcctcgggtaaaatactgtccgcctgtcttcccgtttccgcaccgacgatctctgtcaaaagacgaaccgtttgctttttcagatctttttcatttaattgcggcagattactgttgttttcaggcacagtctctatttctttatgatccgttgagagtaattcacttattctatctttgtctccgctgataacagccagctgagaagcagagcggctcatactgtcctgaaaagcggcaagcccggcttgggcggataaaagttccagccctgcatgtcttaaagcttgcagctctcccggcccgactgtcatattccccgcatcccataacggccaattaatagaaagtgttttcccgggacgtcctttaatgcttcgatactgggtgaatccgtccatacatccgttagcgaaggcgtagtcgctttgacccgcattaggcagaacggccgaaagggacgaaaacataacgaagaaatcaagaggctcttcttcagctgctttatccagccaaacggttccgaatactttaggcgctataacttcttctatgctttctttcgttttttttatgataaatgcatctttaacaagtccggcgctgtgcaaaattccgtttaattctccaaatgtctgcttaatgtgcttaatcaaagcgtccgtctctttttcctttgaaatatctgccgggacatataaggcttcagcgccaagattttcaagagcgctcaatttttgcgccgtttcacgggaggccggggaacggccggttaataccagcttgacttctgcctgtttcgccagatattccgcaaacaggtacccgagaccgccggctcctcccgtaattaaatacacaccgttcttttttacactgaaactatgtttctccccatcttctttttttactctttgaagctgccttttataataatgcctcggctcataacaggtaacgtggttcgtcttacattgattgttccattcaaaagagatgacatctgcaacatgctgctttgtaaacggctcgtcaaacattgatttcagctctgcagccttacatgtgaaattcggattttcggcctgtacggtcttaagaaaactttcaaccgcgttataaatcggctgaacctcgccctcggcattttcatacagatacaaaatttctgctttcggacaaagtttgttcgccatgaaggcctgaaacatgtgaaacaaggaatacagacttttattgagctgctttctcattgcatcttctgtatttttgaagagcccggcagccaaaaaatgaataatatgacgaggtcttatattttgagaacgcagaaccccgcataacgcatcataatcctcatcttttgcaaagttcattgtaaaacgaccgttccggcaatcttcgaaacgctcgccggaagtcacgtaaatgaaaggtgcctcatagccttcaagctgcctcttcattacggtatacatgctgtcgtcttcgcaaaaaaataaaattggctctttcgtatgcgggaatttttcactgcctttaaattcatgtctatcccataccatttcatatagataagttttccccaagctcttaattaattccagcccttcttcaggcgtcaggctgcattctttcacctttttcacgatttgctcaatttgcatcgttttttcattcatggaaaagcaactcctctatcagctctgacgtctctttcgtattcatctcacctgtttgtgctttttcaagaagcgacatgatttctccatctgctgtatctttatttgagttgtgaagctcagtacccgagaaagcctcagccttctgcgcttcatctttaattaaatgaatccaatgtctgttcttgctgaaaggataaagaggaagagacagtttaaccggtttgagttcctcctcatacaagtcttcccagctgatttcacaaccgatcgtccacaactgagccagtttggccggcttgttttgctgaatcagtgattgaacatatgcatgaccttcggggccgccgaataaaggagcgtacagactatcaaaatccgttacatttccttcataaacaccttgcagcctgctcccctgaatgtaaccgtttaatttttcaagaagatctccgatattcgagcaagtgatcgcaaggcggcattcaaatggttcccttccggtttgcagcgtatatgctatttcttcaagaccgattccggacttttctctaaaattgccgttatacggtttatcagctgatcgattccgaacgctgctgatatagcggcacagctcgctcagggtcattaattcctgaaatatgtctagtgatatttctgtgccgtacatttggtttatataagagattaattcggaataagccaacggatcaaatccgaattcagaaagaggcgtctttgcatctatatctgcggtatctaaacgcaggatacccgctgccgcttcccgaaccgcatcttgcaaatcacgttcctgcacctcttgctgactgaattgaactgatagttcttcatgtaaaaacgttgttaactctttggctttaaccatcagcctttcctttgttttggccgatagaacaatgatttgttcccgctcggcagttactgctttatcttgtccatattcaaattcttccacgatgacatgagcatttgccccgccgaatccaaaggaactgactccggcacggcgcggaacttcatttccttttcgatcttttaacctgccccacttcatagttttattgacaatacgaaacggtgttccgcttaattgaatgtaagggttcagttccttgacatgtagtgtggcaggcagtgttttatacttcatggatagtaatactttaatcagccccggcattccagaggcgggctctaaatgaccgatattcgtttttactgaaccgatgccgcaatattgatcatgattctttcctgaatgcggctcaaaagatccaaacgcttttttcaagccttcaatctcaatcggatctcccagttctgtcccggttccgtgtgcttcaatataagatatcgtatcaacaggaatatcggcatttttgtaaacagacgttaacagttctgcctgagcttccgggttcggagcggtcaatgaagcagatcttcctccgtgattttctccggttcctctcagaactccgtaaatattgtctctgtcattcattgccgcttgcaatggtttcaataacagaacagctgcaccttcaccgcggacataaccgtcggcaagtttatcaaacgtcttacaccggccgtccctagacaaaataccgagtttatcagtatacatatgcgtgactggatctaagagcagcgaaaccccgcctgctaccgccagctcactttcgccattttgaatcgagcgcacagctctgtggattgctacaagactgcttgagcaggctgtatcaatggactcactcggacctctgaaattaaaatagtgggatacacggttgctgatgagcgcctggctgtttccggttcccgcaaacgcatgcgccccgtccgaatgcctcatcagcagctggcggtaatcattaaattgaatgcccgtaaacaccccgatatttttgccagacagctttgaagctttgtaacccgcatcttctatcgctttccaggtttcctgcaaataaattctgtgctgaggatccatgagttctgcttcccgcggattaatattgaaaaacgcctcatcgaatttatcggcatctgtgataaagccgccccatttcgaatgtacttcgctgcttcctttgccttcggcgtattttttccaatcccagcgatccgggggaatttcctgaatcaaatctttttcattgattaaattgatccaaaactcatctgcattttttgctcccggaaaaacacaactcatcccgataatggcaactggctgcttctctggatgatggtcagcctgtcttgttgtctttttttcaaacggaaaacttcgcggcggctttacggttttcccggtggttttctcggcgtgcactttccttttttcagaaatgtttttttctgcatctgtattcccttttgcaacagtacgcagttcactgtttagaaattctgaaagagacttaatatggctgtaagtaaagaaaacggcaggtgtcagcttaagcttgtattttttattcagtcggacagctaatgttttcaaactgatagaatcaaagccgagattaccgaaattctctgccgtatccagctgttcaatgttaattttcaataattccgataccatttgcttcagttcttccaggacattgtctgcagacaccggtgctgtataagaaatttcctcttgacgaaccggaagcgtatttactttttgatgcggcaggtctatttttgctggtgttgttccggcatccccggtaacaaccgaaatttgcggacagtcacttgccaaaatcgtctcaaaagccgctatcccttcttccgtttccaaataatcaaacccggatgcggaaagatatgcttcttcagcttctttgtttaaatgcattccgcctttacgccacaacggccagttaatcgaaatgctcttgccttgtctctcttgccggcggctctgttcggatctccaatttatatattgatcttgaaaataattgcccaacgcataattaacctgtccaaaatctccgaagaccgaagaaatagaagaaaatacgataaagaaatcaagcggctcatctttcgttaattcatctaagcataccgttccttcaattttagcggtcatgccctctgaaaaatcagtcagattcatctctgtaaataaccgatcatcggcatgaccagctgaatgaataacaccttgaatggagccccaagtccgtttcgtttcttctatgacccgtcccatcgtcttttgatctgcggcatcagcttgataatatacagcatctcctccaagcgcctgcagccggtcaatgttatggcgtttatcagctgttaacggtgaccttcccgtcaatactaattttgcttgatactgagaggctaaatattttgcaaaaatcaggcccagaccgcccaaaccgcccgttatgaggtaaacccctttctgtttcagcagatgagagtgctctgtatgattgaatacatactcctttaatgtcttaacatacctcatgtcatttatatatttaacttcttccgcctgctgttccatgcctgaaaccatttcgttaagacaaaattcagccattttttcaattgatatacgttctgaaaaaccgattgacttcacattctctgcggatggcaccaacatatttgccgtttttaaacagcctgcaagagcgcccgtatacggatcattcacgccttctttaaaagagtgaacaagaagcaaagaatgaagataaagagaggcgtcactgcgggcgctcagggcttttaataaataaaaaattgattccaggccgctgagaaggtggtcacccgcgtaaaatgtttctcccgtgtgcaagatagcatcaggagaacatccctttttctctaattcttcaaataaacgaatgtaatctgacgtcacttccgggtttacacagaatgtcagcagattttgatcggtctgccgctgatccggcgtgacgagaatgacacggctgtctgattgatttttcagagcttcagctaatgcttcatcttttgcaaagaccagaattgtttttggctccctatctttgatttcaatcagagggtttttttgatcccacttatgctcataaaaacgtacatttttattaggcttttcgccaaaaaccagcccgctcagttccatcaaaatcccgccggcattgtctaatacatacacatcataaaccgaatcgctttcttcagtttgttctgcatatacataaacgggttcagtctcatgatcaaaaatcgtacattctttaatgttttccgggagctctccggcattttcccccgcaaggtatatgacggcttgatatacgctctcaataacttccggtttgattatgcaccctttcggcccggcctttgcttttatctttaaaagtacctgtccgttcctgctgacgcagtgctctgccgctttcagactgtcactgcagctgtatccgaattcggcaagccgctgataaaacgcttcgtacggtatgcggtctgcatgctgagacaggaacggctcaagatgaatatttccgttctcgtacactccgccttctaattcaagccgccctgaggaataaatggatgagtcgctctgtttttctatagaatacgatgcaccctgattatccggggttaatacaatccggatctgctcattgcttccgctttgtaacatcggttctctaaaggagagctctgttaatttaataatcggattccctgaagccatcgctccggcagctctcgccatttcaatctggctgagaaacggaaacatttccttgtcttgatactttgtttttatatacaaaccggtatcgcttacattgataagaaacttctgtgctttaaaatcagatatattgcatgaaatgtaaggatgcagatcgttattaacgttcatccggcggcttcccgtattttgcgcatctattctgcatagctctttggcaaatggatatccgggtgctgaaatccgtctcaaagtgacatctttataaagtgacggccaatctactccgttaccgccaacccagtattcagcaatcttcacaagatccctgtttgcggctgcttcttcaatctcagctttgttcatcctttgagcttctgttatgtctttgccgcttgtaaaaatatgatccatcgcgtttccgagaatgtagtctttcagtcctttaagcaattcatctcttgtggaggcgataacagccaatctgtgcggcatttcttctctgccggtttgtaaagtaaatgctgtatttctaagtgtttctaatggataatctctgcctgctatatgttcttttgcgcgttttgcatattctgccagcctgtcggcattttttgcagaaaaaacaaataaaagctgttcaggttcttcagcagcgagaggagagatagcttcatccgcaaattcttctaaaataacatgggcattagctcctcctgccccgaaagaactgattccggcacgcctgggaacggatgactcccatttttcggcactgtccggtacataaaaaggtgttttttgaaacggtatattttcattcaattcagcagaatgagtcagtgacggaacaatcgttttatgtttcatttgaagaataactttcgtaatgcccgctatgcctgcagcagcctcaagatgtccgatatttgatttaatcgatccgatcgcgcatgttttcttatcacgttcggcatctgaaaatgctctggtcagaccggtgatttcaatcggatctcctaacgcggtgcctgttccgtgagcttctatatagctgatgctttttggatcaataaatcctttttttaaggctctcgtaatgacctcactttgagctttgggattcggcacggtatatccattcgtcttagcaccgtggttgatggctgttgacttaataactgaataaatctgatcaccgtccgcaatagccttttttacgggtttcagcagcacggcaccggtcccttctcccggcacatagccgtctcctccggaaccgaagcttctgcaccggccatcactggataaaaatccgccttgggtcaggagttcatatttatgaggatgaatggataaattgacgcctcctgcaattgcaatttcacattcattcctgattaaactttcacaggcaaaatgaacagccgttaatgatgaggaacacatcgtgtccaaagcaatacttggcccgctgaaattaaagaagtacgatacccggtttgcgattgatgcatatgaggaagaaacggccgcttcgtgaccaacactgtacagctgatagtggccgtacataacccctgcaaaaacaccgacgttttttctttcaagcgttttctttgcgtaccccgcatcttctatggtgtgccaaaccgtctctaaaaacagtctctcctgcggatcaattaattcagcttcggcaggagaaatattaaagaacaacggatcaaaatgatacacatcgtcaataaatcccccccatttgctttggttttttacttcgtcgcccgctgcgggctgatagtgcagccccgaatcccaccgatccttaggtatctcagttatacagtctttaccgttcaataagttttcccacagagtatcaagatcatttgccatcgggtaacgtccgctgataccgataatcgcgatatcattatcatgatacttctcctgctgcacctgatttttcatctggattttctgtttcccgttaacatcggctgtctgtttatgatcttttttcttctgagatggggcgctgctcccgttttctcctaaccggagtttatgaagaagagtatccctgtgctcctcaacgaaatactgtgacaattctgccgcagtctgatattcgaataacagcgtttttgagagcgcgccgaaatgtttttcaagctcattcgtaatattgataatcataacggaatcaagtccgtatttttccaatgcctcttctgcatctattttgtccgcaggcatcctgaattctgcagcaatcatttttatgatgaaatcagatgtttcagctgtcagtttctctgaatcaaatgattcgatatttctccctgttccttcatctgcctgaatgctttcttttcgttcatataattgctgaacatgattgtcaatttgctcatctccgtaaaatacagtaaattgcgaaaaaccggaggacaatgcgactgcaaacgcttctttaccttcttctttttctaaaggataaaaacccgcctttttcattgtctctaccgttcgttcatccacttgcatgccgacttctttccacagcggccagttcagagagagagaaatcttatcagaatgctgggcagaacgcatattcatgaaatgatccatataactgtttccgaacgcgtaatcagattgcccgacatttcccaacactgcggaagtagaggagaagcaaatgaaaaagtcaggattttctttctcaacagcatcattcagccacatcgtacccaatactttcggtctgattacctgatcgaattcctctcgtgacttgttaagaaggaaagagtcacggatgattcccgcgccctgaatgaccccgtttacttttccataagaagttttggcttttttgactacatattcggcttcttccttattggtaatatcagcctgaacataaacagctgaagaaccggcatcctctaatcgtctcagctgttttcttatatgatctgaaagcggagatctccccgttaaaacaaggcagcattttgtttgaaaagccaaatattctgcaaaggtaaatcctaatccgcccgcgcctcctgcgataatatatactccattttctctcagcggcacatcttcgcttccggaatttttttcgggttcatacgttttgagctgtttgacataacgctgcatgtctttataacggatctctacatctgaaggctggaaatcactcagctcattgcgtatgatatcagctgcgtgatcggctgctattgactgctccatttcaatggtttttgctgagattaacggattttccagctgcaatgtccgcaaaaatccgcttgccgccgcgtaaagaggctgttctccggaaagatgcgaaaaatatccatataacagcttgatcggtttgcggcagttatttttgaagagcgcctgttgtaataaaaacaaagaatagactccgctgtcgcattgttcacgaatcgctctctctgtcttttcaaacggcatgtctgaccacaaatgcaccgcttcccgtatatctgacttctcttcttctataagccatcctaacaggtttatgtaatctctttcagagcgggggtcgatttcaaacacaccgtccccgatttttcgaaactccttccccggcttaaccaaaataacccttgtatcatgcaatgcagcaagttctttactcacatcttcatttttatcaaataataaaaggctgccctcacgtcggccgccttttacatgaatattaagatctgtccgctgccagaccgtctgataatatatcgcctgtccgttaccccctgcggaatgagaaccaagctgctgtatccgctttactccttcttccaaagaaatgatgccgctttctatgtcagagagtactttttttctaatatgacgggcttctttcataaaaaccttcatcccctttacaaatggcactgccgcaaaatgataaactaatcctgcatacgctccagcgcataatctgcttcctccgcagtcagttcgcccgcttttaattgtctgaggagctcttttactctctcgttctttccattggaatccgctgttgtatgattctgtgcctccgcggaaaacgtttcttttttacgaatggttacatcctttaaacctgcaagtctctctccgtgttcattaagcagctgaatatcgtaaataagctcggattgacctttttggcctgttttacgcgcataagcccagcattctgctgaaacttttttccgaatcgtaatctctcctattgaaaaaggaacataaacagatgcctcttctcttccgtccgtaatgccgaacaaagattgcagagccccatcaattaaagacggatgcaatgtataattttcaagagcatatgcagcttcttttggcagcaataagtgtgcaaccgcttccgttccgccgccccataaacgttgaatcggctgaaaagcgcgcccatacaggaacccgttttcccgaaaatactcgtaacattcatcttgttcacggacaaaagcacttctgtttatcatctcttgtctgtcgatgttctctatatcatcatcactgtaatgatgatcataatctaattcccccgtcacaaatccagtccttacagtagcatcctcgtcaggtgacatgttaaataatatgctgccgtcttttacggaaatgtgagtgtaaatggtcaggctctcttgcaaaagcatggccggtctggcaaatatcacgttttttaaacgagtaacctttttctttcgatatgaccgcgttcccgctgcgcatgccatttcaagaaaagcagctgccgggagaatgctcttgttttttacaatgtggtcttttaaccaaatctctttgtctcttaatgtcgttttaaaaaactgctgttccagagtagattcattcgaatccagaagcgggtgcagtgaagactgctgcggcaatatttccggaaatactgcactttggcttccaggcacccagtaagactcctcagcaaatggatataaaggaagcttgactttttgcggggtatattcttcatataactctctccattgaatatcagccccgaaagaccataattttgcaagaagattcaagtcctttgtctccatcatcacctcgaggaatttatctttcatcttttgatcatgaaagataaagactttatcaaaatctttcgtaacattgcctttgtatacgccctctccaattgttccttcagtacagaaagttctcagcttctccttaagttccggcaaatcggaagctacaacagcaagtctgtcttccatcggttccctgcatgtctgcaatgtaaaagcgatatcagctgccgaggcctttgtctcccgctctgtgaattgcagaaggcgccgggcgtattctttcagtctgtcttcatttttggcagagagaactgcggcaaacggaccgcttattgtttgtgtgtccgcatggttttgatattcttccacaatgacatgggcatttgctcctcccgctccgaacgaactgattgctgctctcctgttggaggcgcctgattctttccgccactcttcttctttctgctgaacgtaaaaaggcgtcttttcaaatcggatattttggttcagctgttccgagtaaatggatggcgccaatttctggtgcctaaattgtaaaagaacttttgtaagggctgctatacctgcagcagactccaaatgtccgatattagacttcactgaacctatggcacaaaattgtttatcgtccgtaaatttctcaaaagcttttgtcaatcctgcgatctcaatcggatctccgagcgaagtacccgttccgtgtgcttccaagtagctgacggatcgcggactgatgcccgatttcttgaaattttcagcaatcagctcagcttgtgcattcggattcggaaccgtaaatccattggtttttccgccatgatttacagatgttcctttaatcactccgtatatatgatcctgatcggcaattgctttttccagaggtttcaacaggacggctcccgaaccttctccagggacatagccgtctccgccctctccgaaacttctgcacaatccttcggtggaaacaaaattaccttgactcagccaaaggtatttgctggggtgtatggacacattaacgccgcccgcaagcgcaatttcactttcccctcttttaatgctttcacacgccaagtgaatggccgtcagcgacgatgaacacatcgtatccagtgcaatgctcgggccggagagattaaaaaagtatgaaaccctgttcgcaatagatgaaaagaaggaactgagcgcaatcggattgccccgcgcagtttcttctgcgccgaataattgatattgtccgtacatggctccgacaaacacaccggctttcataccgttaagcttctcttttgtatatcctgaatcttcaaacgtatgccaggaggtttcgagaaaaattcgctcctgagggtccatcagctcagcttctttatgagaaatatggaaaaacagcggatcgaattgatcaacaccgctgataaaaccgccccacttactgttgattttccccttctccattctgtcgggactgtaagtcgatctgaaatcccaacgttcctcggggatttcaataatacagtttttccctccggcaatgttttcccagaactcctcaagagtatcggaattcggatatcttccgctcacaccgataatggcaatatcctcatccggctgaaccatgctcggtgcagctgcaaccctctgctgccggtgctgttttttactcggattttctcttttcttctgcactcttgttaccggagctgcccctgcggccttaagcactttttctttaaaagatgttaggaagaagtttgaaagctcttcaatgttctgatattcaaaaaagattgtttttggaagatccccgaaagtatcttcaagctttgaaataagtgacatgatcataagtgagttgattccgaatttctcaaaagagtctttcgcatttattttatgagcttggattttcaagacaccgctgatgatcttgattaaatagtcattgactttttctttcgcagcatattcctcttcttcatcgtgttccgccgtgagtgtatcttgatctgcagcagctgtgtttctttgaatcgaaagcgcttttatcattttatcccgctctccttctgcaggcattaagctggtaaatgcagaccgcagcattttcagaaacgcttccaaaacagaggaagttcgcatcggcgtcattccgtatttttcttttatttggttgattccattgctgtcgagactcatcccgccatctttcaataacggccaattgattgatagtgtttttccgtttcgggagagctgagatcgaagcattgcaaaactgtccataaaatgatttgcgtacgcatagtcactttggccggcatttccgtaagcagaaaaagaagaaaagagaacaaaaaaatcaagatcttcgtcttttgtcagctcatccagccagattgttccgtaaactttcggtttcagtacgtccgtaaaatcactgagacttttatttacaagaaatgagtcacgaaggatgccggcagcatgaatgatcccgtttatgctgccgtaccgctgtttaacgccgaaaatgaatcgctctgcctctgttcgatctgttatgtccgtccgctgatattcaacaatagagccgctctcattaagcttaccgatccgttctttttgatcagctgttaaaacagaacggcctgtaagtataatcacggcttggttttctttagcgatgtgttccgcaaacagcagcccgagttttccggctcctccggtaataatatatatgccgcctttttgatacgttacagatcctttattgtgttccggaatatcaataggctgcagccctttcacaaaacgggtatgtgagtctattaaaatctcacattcatccgtttgagagcgctgcatttcactgattacagcatcccatatctcggaaaccggaggatttatgtcagaatgctcatggcgaatctgtatggttttcgctttaagcttggagctttctatgtttaccgttttcatgaaacctccgacagcttcatgaaacggctgattcagaccccttgtccaataaatatgcaataacgtaacaggttcgtttctccgcattaaagcttttgataataaaaagagcgagtttatccctctgcaaagagtttcattaacggattcttcagtgaattctctgatttctccgttccataaataaagcacgacatcaggtgtaaatccgttttcagccaaatcagacagcagcatttcgacatgacttacatcagaaggattgattgtgcatctattccgttcaattctataatcagaatcgggcgttacgagaatgacacggttatgatctccattcatcatctcggcatgctgaaaaagacggttatcctgatcaaaaatcagcatattccccggtgcctgctgattcggcatatcaatgttatttgtccttacccaatcgttcttaaaaaaaatggttggggacggagcttgctccgcctttttttccatttgttcttttctgtaagtgcgaattagctccagtcctgcatcaggagacatttgctgttcttcaattaaggaaagtatttgtttgatctgcactattttccctccagcagctgataaacttggtcagcagaaagttcaccgtttttcaattgttctaataagaagagaatttcctgatcttcatttttacgtcctgcggttaattctcccccggtcacttttctgacagaaaagtctttcatgctcacggctatttcgccgctctcgttaataaaatcaatgttatacgtataaaaaccggtttctctcaccgaaacatggcatcgggcagtaagcgccctcttaatgtgaagctctctaagtgaatatggaacaaataagccctctttctcattacctcttaacaaaaatgcagccgcttgaaaaccgccgtcaattaatgaaggatggagtgtaaaatgtgaaaaaccgttcgctaaatgagccggaagctccaattctgccattaactccatatcactgcggtatacggctttcaacgtttgaaaactgctatgatatgtcaggcccatacgactgaagcggtgataacactcttcccggcttatgaccggcccactgctgcgtttgaacttatcaatatcgacatactcaggattgctgtttatgtctccgaatcctatttcacattgggtgcagatttgctgcacgccatccggaccctctttacatatcgttacgttcaacttatcttgtttcatttccaagtcggtataaatgtgcagcgtttttcctttatataatataggtctgttccacatcacgtcttttattttatatactttactttctccgcttatttccgcacaaacgagagccatttcaagcgaagcggctcccggcagcacatagtctcctgaaacaagatgatcagtgacgaaaaattcagttccggaaataacagttttaaatgcttgtttctttaatgttgagacattctcgctgattaatgggtgaagacttttgctattaacctcgcttttgttctttttcggagtaaaccaataactctcttttgcaaacggataagttggcagcggcactctattcaatttcttattgccgattgtcttccattcaaactcggctccattgacccaccattgtgcgagcagctcctcttttccgctttgaagagcctcctcaatcatatattcagaaacagctgtgcgctcttctgtgttttcgcttataaatacgcctttttgcaccttgctgtcatcaagaaagctgacgtatttatctctcagctcagtcagactcgctgcacatacggcaattctttcgttcattgcttcccggccgttttgcaatgtaaattccatgtcactgacattaacggtcatttcaccggcaatcacgcgatccaagtactgacgcataagccggatatactcaagtaattgatcttttgttttcgcagataaaacaaaaatatgtgtgttaccgttgttttccggcacttctttttgagattccctatattcctctaaaacaatatgcgcgttcacaccgccgaatccgaatgagctgacacctgctctcctcggcagatcgttgttctcttcatcttttatcggattccacttttgagcggtttctgtgatataaaatggcgtattttccagtttgatgtatggattgagttctgaaaaatgggcgagtcccggaagtttgcgatatttaaaagccagtaacactttcatcactccggctattccggcagcggtttcgagatggccgatgtttgttttcacagacccgattccgcagcatttctgtttcacaaaaggaatgtcccattcttgatataacgttttaaatgcctttatgatgctgtttacttcaatcggatcgccaagacttgtccctgtgccatgcgcttctatatatcccgcagtggcagggctgacccccgccttccgccaagcttcggttaataagtccgcctgagcgttcggattcggagctgtcaaagaattggcgcggccgccgtgatttacagctgaccctttaatcaaaccatatatatgatcaccgtctgcctgtgctttgctgagcggcttaagcaatactgcagccgccccttcactccttacatagccgtcagcgcttttatcaaacgttttgcactttccgtctttggaaagcatacctgctttatcaaaagctataaacagagtagggcttgtcataatatgcacaccgcctgcaatcgccatttcaaaatcgcctctttgaatcccctcagccgcacgatggagcgcaactaacgaacttgaacaggcagtgtcaatcggttcgctcggacccgtcagattcagctggtaagaaatacgatttgccaatatacaatgatttaaaccggttgcggtctgcgcctgaacagagacgccattttcattcagacgttcagcataatccgttgtggcgacccctgcaaacaccgctgttttcgtccctgccaaatcagatggcttatagcccgcatcttctatagttttccatacagtctccataaaaattctttgctggggatccattaattctgcttcggcgggagaaatcccgaaaaacaacggatcaaaactgtccgcacctttgataaatccgcctttttttatttttgttctattgacgtccctgatcggatcgccgtcaaactctttccagttccaacggtcttcaggaatgtctgtaatcatatcccgccctttttcaattccttcccaaaagtcttccagcgaatctgtttgggggaaacggccgcttattcccactattgcaaccggctcattcatatgtctttcctcttgccaagttttgttttcaggctcaggggaatgttcataagattccggcggaggcgtgctgtacaatgttttttcgtcagctgcagaaaaagattctgtctcagcaaaaaggatttctctgtattgctcgattacataatcagtcagttcagccagtgaattgcattcaaagaaaatggacggcaataattccgtaccatattgttgattgatttcatttccgagtctggtaaacgtaatagaatcaaatccgtactcgccgaatgaagtctcttcttctatttcctttctgtcaatctttaaaatacttgacatcatctttgcgatgccctcaatcagattttctctcctgtctttcgccgcagattcatctgaagaaaaagaaccgcagagatgaagctcttcagaatactcactctttaaaaactcaagaagttcattaaaatcagtaagaccgaaaaaatctgacggcatcattgatattcctaatgactcgtttaattcgttgcccagcattgtaaacataattgaatcaaatccgtattcacttatcggcagttcaaaatcaaattcccgttcttcaatttttaatacgccggtgatgatgcgcgtcaaagtgctttttaaagattcagttattgacagctctttcggttcgtgattttcgtcggcgattgccgggtcactttttccgctgtcaatcgttatcattcgttccagctttaattcattaccgctaaataccattatttgatgttcacaccctgtcattgcttgatcaaatgctgcaaggccttcccgtttttccagaggcagcattccgaaacggtcataaaggaacttctctgaatgaatatcaatttgcataccgccttctttccataaaggccaattaatcgagactgtttttccaggtttattttccgccgctctcatttccgcaaaataatccataaaccggtttgcataagcataatcagtttgtccggcattcccgattattgcgctgatagatgaaaacataacaaaaaagtccagaggttctctgtctgtataccggtcaagccatatcgttccgtaaaccttgctggccaagactgaatcgagatcctcttcacgcttattgatgagtaatgaatcttttatcacaccggcgctgtgaataattcctttaacaggacctaatttgtttttgacgagttttatcaggttgtcgacattttccttatcagaaatatcggttcttacataaaaaacttctgatccgtttttttcgagctcttttacattgcttatggcttcctcagaaagctctgacctgccgataaggacaagttttattctcccttttcgcacaagatgtctggcgaaaatcagtcccagaccgcctgttcctcctgtaatgaggtaaactcccccttcttttacttccatctttttggggggctcggcactttcaatttctgcagagtgctttacctgcctgattccatctctgtatctgatttctgaagaagtatcatcgctgatgactgtttctttcacaaggttttttaattcaggcagaccggcgttcagctgtaactgaatttcgtcgctgtgtatttcaatatttttaccagacaacataggatgttctaaatgaagcgacctaaaaaagccgctgattgccatttgataaggtaagatttgattttcccttgtgaaaaatacatgtgatatcaggattttatgtcttgggattgttgctagcagagctttcgttacattgaaaaccggcaaaacagcctcttccagcttttcacgaatgttatgctcaattcccgtttcagggctcatcccgattaaaatgacgcggtcaattgtcacttgtctttctttaagaatcgccagcaatttcttatagccgtcaagtttgacgctgttcaattcaaatgaatcagcttctttttcttgaaaactgccgccatggcggacaaagatcatgttcaagccgatatctttatatgcctggcggatcagcggttctgatatatcccgacggagtgaaatcacaaggcagctgtttaaaccgctggcttcaggcggatgaagcagaggggcccgcttccacatatcagtgtaatacttaactgaatgccgctcatcttgagtcggcggtgcagcccttgatgccttcaacgctaagttttttattttaagacttacagatccgttttcatccataaatagtatatgaaaccttttgacatcatcatgttgtctttcatcggcagctgtaatgtaagcatagccgtttgccgaaggtgcatgcagaatctccagctcgcctaattcaaaaggcaaatatgcggtgtgatccccttcttgaccggacataaacccggttgtggattgaaaaataccatccaataaacacggttccagcagcgtgccggattttttatgaatgccctcaggaagtgatattcgtgcaagaacagcattttcatggataaacagctgttttattacctgaaaactggctccatagtccaaaccgctctgccggaaggtcctataacactcagcgccgctgattaatcttttctgtccggttaaccagctgtccaattgaaaatgctctgtatgagaggcatctttatctccgcatgtgataatgtttccttggcaatgaactgccgcttcaggttgcatatcggttttcaccacaaatctgccgtctttttgattcggcagcagatctatcataatcgtcttttctttttcaacgattattggaaccggccatacaacctgactcagttttatgactgattttccgtacagcctctctcccgcttctctggccgcttcgatgattgccgctccgggcagaaccatattcccatccacaacatgatcttttaaataatattcaaaatcagaaagcgttttataaaatcggcactcacctgcagaaaaatcaaataaaggagttgtaccggctgctgattttgtttgcgccttatttgacacccacagtctgttttttaagaaagggtaagtcggcagcgcaattttcgccggttttctgccggtgcggaaatcttcccagcttaaattccctcctgatacccagaattcagccatttcggctaatgtggttctgccggatttgagcggagaatccgattgctgctgtctgcgtttatgattcggttttttccctctaaatatttcgtgatcgtcaattccattataaaagtgatttaatttcaacatcagatcatcgatattatttgaaatgacagcaagcctttccggcatggcttcgcgcccttcaagaagggtatacgcaatatcagaaaggtgaagcggcttgtttgttcccgcttgctgcaaaaactcgtcctgcttatgacgggccttttgaagatattcctccagctgttttgccgattcccgtaaactcagtgaatgcttggctgagagtacgataagttcctcactttcctcacaatccgtatgacagtcagcagcagactcatactcttccacaaggatatgagcatttgccccgcccgctccgaaagaacttaatcccgcgcgccgcggatatttgctgtcagaatgtttttcattcacgggttttatccagtcggcggtttcctgctgaagacaaaaaggtgtctcttccagataaagatccggatgcacccgttccgcatgcagtgttgcggctatttttttatacttcatttgtaagataatctttgtcaggccggcaatacccgcggccgcttccaggtggccgatgttagatttaatcgatccgagagagcaatatgaaacatcttcggtataagctctaaacgccttggtcaggcctcggacttcaatcgggtcacccagcggcgttcccgtgccgtgggcttcaataaagctgacacttctggcgctccaaccggccgctttaagagctccttgaattaaatccgcctgtgcggcaggattaggcaccgtatagccattcgtctttccgccatgattaattgccgttcctttaatgacggcgtacacagtatcattatcacgtatggcatctttaagcggtttaagaataacggccccgacaccttccccgggtacgaaaccgtcgccgccttctccaaaacttctgcattttcccgattttgaaagcatccccatctgacatcggtataaatagtcagaaggatgaagatacaaatttactcctcccgcaaccgcaaccgagcactcaccctttgttaaactttggcaagccatgtgaattgccgttaaggatgaagagcaagccgtatctacagggacactgggacccgtaaagtcaaatgtgtaagacactctgttcgcgagagaccatgggaacgaatttggaagtacatcgtttttatccgtcggtattctttcgccgagcagcttgtaggaattggttgtcactcccgcaaatacaccgacatgtttttcagtctgctttctcaacccttcaatggtatatcccgaatcttcaaatgctttccacacggtttcgagaaatattcgttcctgaggatccatcgcttctgcttctctcggcgatatttggaaaaacaaagaatcaaatgattcagcattctttaaaaatccgccccatttgcaataaattttcccctcatgcgctttagcgggatctggatcatagtaggtctcataattccatcgttctttcggaatttctgtgattgcggttctctcttttgatagaagctcccacaattcttcgatattttcagccccgggataacggccgctgataccgattatcgctatcccgtcaagatgttctttttcctccgccgcaggtgcagtgatgttttgttccggcctggcgggggtaatgctctgaatctgttttcctttttcctcccgtgaaaataaacgccccagccgatccggatattcctttacaagatgatctgctaaatctctgattgtatgaaattcaaataaaagcgttttcgaaattgctcccagtgactgctccagctttgtgttgcattgatgaatcataaccgaatccattccatattcagccagatgcacatcttgatcgatctcttcccgttctgcaccgacctcagaggagatgatattggttaaaaacaaaactgtctgatccaaaatatcgccttgagccaaaggaatggcactgcctgtctctgtttcgtccgtcaaaaatcgctgccgcataaattgttcaaagcgctcatgatcaccgcagactgcaatattatgcagctgacccgaagttacaatccgcgaaaaccattgcgttccgtcttcagcaggaagttcttcgagcccggaaccatgaaaaagagacgtccgcccttgacctgacaggttcgcccccattccgatgtcttgccataaaggccaattgattgtcagcgtgcggccgctgcgcagagaattttgccgtttctgttcccgatattcggcaaaatgatctaaaaagctgtttgcatatgcataatcacattggccttcgttccctgcaatagagacgactgaagaaaaaacggcgaaaaaatccaattccagcgacttcgttgcatgatcaagattcaatgcgccatgaacttttggagcaatcacctctgaaagttcctgctttgtttttcgaaaaagcagcgagtctttgataactcctgcacaatgaatgacgccatgaagacctgcatgctgatcggtaataccgtcaatcattttttttaccgcttctttatcggatatattcgcctgtacataataaacctttgctttaaagctgttcaggtattctaaatgtttctgcttatctccgtttaaagcagatcgccccgatagaataatggtggatctttcagttttcgcgcaatattcagcgactttactgccaatccccccaaatccccctgtaattaaatatactttatctttttcagggtattgaatggtctttgtgtatgtttctctctgcttctctaacatccgtgcatatcttacgcagcctctgtaagtgatatgaatatgccgatcaggcgctgtgtttatttctttataaagaatagcagccttctctgaaaatgaaacggttgcagaatcatgttcaaagcaaaccgtcttacaatgcagctgcggatattcttgttttaccgattttaaaaaaccgttcacaccttcaaaatacggcaatttttctttttgatttgcgctgaatgtataaatgaacgttactttgtttataaggttctcgctgattaaagctttagtcagataaaacccggaataaattcctgattcgagtgtttcttccagttcaggccgtttttcagaccacgtatgcaaaattgcatcaggcgctgcgcctttttcttttatcagacgaatgacaccttgataatcttcgggacgctgcctgttgatcgtgaaaacactgtcgcttatctgctctaaacggtcaccgggcataataagatatgcggacgtattctctctttttttcagctcttcaaaatagtctttgtttccggagaacaacaaaatagtacaggcttgtccgctatccgcttcattctcaagtgcggtttctttccataccggcgtataaagtgcctgattcttcttttctgaaaaagccgcgtctgattttacctgctgagggtttaaagaaaattgagagcgctcaaacggataaggcggaagcggggcttttcttttatgatagtcacctagtttcgcccattcaatctcttctcctgaaagccacatttgcataaatgaatgataaagagcctcatcagctgctttgtccgtttcaaaagcagccgctttgtttagttttgctgatggagggagcgatccgaattggaaaactgaaaaatcagaaatatccacatccggctccgttcccttttcttccgtgtgatgcggcatatgatcagctatctcctgagacacggcatccatttgattgtattctgtcatcaacggaaaacgagtcttatcataaaaacctgccggctgctcattaatacaagcaacagcctgtttaattccgtcttgctttttcaataacatgctcagaaaaagttctttagacaagattccttcaccaagtaaatttaatatttccagaacataatcattattaaagaatccatcataatctgttaaatcccatctcttatacagtcttctcatagaggcaaggatagccatgaccgccgcttcctcatcagccggcaatgcatttcttttatccgccgcgcgattcacaatataagataaaatctcgatttcctgagtcttccccactttatcccactcttctaaaaaccctttaaacgtatattggtgctcaagaagcagccgtgttttcccgtacaggcggtctgtaaaatcagccgggaagctcagaccgttcagcagcatccttacataatcttcatttaatcgaaccggcgggtacgtttttgaagtgtacggattgacaaatggaatggacggcggctcacaggatatgtgcgaaggtttttcagcgcctgtgattacagaaatggccttttcaattttgatgatatccgctgctgcaagagcgacgtaatatccgtctccggcgcctgtaatgaggcttggcttaaaaccggatgccaggatactttttatgatttccgtattgataactaaagaatacaagcggattttctcaggtgtccattttcttttaaatgaactgtgcaatgttggtatatctttcagcaccgaccttacgttcttttctaaatcagggaacacccgtttcaaaacggcaaattgtttataactttcccatttgaagtcaccgatggcaagcgcccattcagaatcttgtttcctccgaaaacttaatccctctttaagctgatttttaaattcctccttgctgcctgccaataaaccagccctgtaatcaaacgatgtcctccccgttaaaagggtgctgctgatcacttcatttgatattttgcaaaattcctcagaatcgtcagcaaaggttctccaatgatgtatcatttgtttcatgctttcttcacttttagcggaaaaaaggaagggtacccttccttttctgtcagattcgtcttttgtatgtataaattcttcgatgatgatgtgagagttaacacccccaaaaccgaaggagctgattcccgccctgagcggagccccgtctgccgccttccaatcacttgaatcaagcgccggcctaaacggtgttttttcaaactgtataattggatttaccgtatgtacattcaggcttttcggcaccctccggtgtttcatcatcattagaacttttatcaatccggccattcccgccgctgcttctgtatgaccgatatttgttttcacacttccgatcctgcaatattgagtatcctcagtatattgccgatacgcttttgtcaatgcttctatttctatcggatcgcccagagatgttcctgtgccatgtgcttctacataagaaaccgtcgcagcatcgacagcagcgttgtgtaaagcttctgagatgacccggcactgcgcttctgctctgggagcggttatggaacgggatttaccgccatgattaacagctgtcccttttatgatcccgtatatatggtgaccggcttttactgcatcaccaaggcgctgcagcaatacaacgcctgccccttctccgggaacgtacccgttcgccgctgcgtcaaaggttttacatttgccgtcaggactcagcattctggctttggaaaaagaaatatattttccgggttggaaattcaagtttactcccgatgcgattgcataatcgctttcttttgtccgcaatgacttaaccgcttcatgtaaagcaacaagcgacgatgcacaagcggcatttacagaaatgctttttccggtcaaaccgaatgtgtatgaaagccggttggaaagcatagcttcgaaacttcctaaacaggcataactgtcgatttccgattcagctttacctgtctgccggtagtcagaattcataatacctgcaaaaacagaagtggttttacgctggagatcctgcaaagaaaccccggaatcttcgatgcaccgccaagtttcttctaaaaggattctttgctcaggatccatgtttttcgcttcccggggagagatattaaaaaacttatggtcgaaatggtcagctttatgaataaaacctccccacttgctgattgttttgttcggtacactgatatcagctgaataataaagttcgggatcccaccgttcaatcggcacttcccggatggaatctttgccgctatttatgttttcccagaattcatgataatgatctgcatctgggaatctgcaagcaaccccgattatcgcgatatccgcattctgtttattcaaatgaaccattggcctccacccgctccttctttagtgtagaaataacgtatccaatctgtgccttagcagactttcggtctcattcatcaatttttcaccaatgtcatcgacatgtctgtttctccatgattccaaatccgtgccctttacccaatgattaaaagcgcctaaagacgggccgcaatgaacttggaaattcaccttttgttcttcctgcccttccaaagcaagcagacatcctctttgcaaataccacttaaatagtaacagcatcttatatttttgattgcgctcagctttttgggccaggttcggctgtttatctattatgctttcgtagatttcatcaaaagtcttgttaaaataattattttcgagctgaatctttgtcttttcatctatctcactcaaagactcgtattgttggtagatttgaaataatttatttgccctgaccggaaacagcgtgccctttttcagcacctgaacctttgttccgaactcaaacagagtctccgaaggcgcataagcagtatcgcatattcctgtctcactcagcatttctttaacaaaaccgcttgtttcggcttcaactgtacattgattaatggatcccgtcataataaaatcagcgcccattaaaaaagcagacgccgcagattcgggagtcccgattcctcccgcagccccaatccttatcttccttgcgtatttgtgtgtttccatcatttcatcccgcaggttaacaaaaaacggcagcatcgccgtcaatgagccctgttcggtattacttccgcaatctgcttcaataatgatatcatctgctgccggaatacggctgagccactccgcctgctcttccgtcagcataccgtgctgacacattctctttacgatactttgaggaggcggactcagaaatgcggccgcaacttccggccgtgaaactttggcaatgatccgattatgaggtatgaccctgccgcttttgtctatcttcaactgatgcgctttgtaataaattaatggtgcgctgacggaaagatacgaagacgcttctattactcgtacgtcatgcttgatatataaatctattaattccttttctctatcttgatgatccggctcaaatcgcagattcattccgtagggctgaccatttttgagtgtcttcttaatagaaataagggcctgttcaatttcccttataggtaaacccgctgtgccaaagaaccccagcattcctttcttcccgaggcggatcagcatttcagcagaagagatccctctatgcatcgcacctgccaaatacgcgtatgtcaaaccgtaatcttctttgaaagattgatcacccaatcgggacaccggtgaagctgcaccgctctctatattttcggccaagaggctatgctctttcccgctttccgaattgtccttgttcccttcagaaaaaaagagactgtcttccggcgcactgatagtaagcggttcctcatctctttgtatggtgtgaattaatttagtcagaatgttgccgggaccgatctcttcaaacacagttacgccttgtcccattaaatacctgatgctttcagtccatttcaccgagtttgttatttgttcaattaaattccgtttgatatcttcttgtttataaggtcttgccgtatagttagagatgaccgggaaattcaattcagaaaaatgaaactccccgataaattctgcaaattcacgctgtgcactttccatgaaacgagaatgaaaagctccgccgacttgcaatacgatataagctttcgccccttctttttcaaaaaaagaggctgcccgctttatctcatctgcagcccctgctatcacaatttgtgaagatgtattgtaattggcgatatctatttggccgaattcatacttttgaagtattttttttatgtgatgctcatccagtccgatcacggcagccattccgccctcggaagcctcactcattaactcgcctcttttagcaaccagccggagacctgtttcaaaattaaaaacgccggccgcaaaaagcgcagtatattcacccagactatgtcctgcaacagcatcagggcgtgtatgaccttcttttaaaccctttaaatattgcagtgcgctcactgtataaattgcaggttgtgtatacttcgtatcagtcagcctctctttttcatctgaaaggcataaatcctttatggagtatcctaaaatatgatctgcctttttaatgagctcactgaattcatcgaataagtctctgcccattcctttaaactgcgctccctgtccgggaaagacgtaagcaagcatttgttttcctcctgttccgtatttctgccgtttcttttcgttccgatttgattaacgtttttcacttcaattttaaaattgtcgtttactcttagcacacttacttaataagcattactgagcaaaataaaaaaacctttatgccggataaaggtttaaaagcaaaaagcatgtataaatatcatattgccgtaaatataaatagatagaattttctgataattaaaatcacattttcattctgttttatatatatcaatataataaaaacattccaacgtgccgaaacaacgattggttttatgtgaatatttccctaaataaatactataccatgatttacttgttgtcaatgggaaacacacgtatataccaattcttcagccgcctttttacaggcggctgaactcggttgttatcagttcatcagcccatgccgatatgccttcactatactatttacggaataatagttctttctctttgttgtagtctttagtaaattgattgaactcatctgcttgtttatgcaccttttcgtaaactgagtttactttgctgatttgctcttccagctgcgctaatgtgagctttttatctttaatcagtttataaaggtccttatcaagtgaaatggctttttcgtactttttgtacaaaagatcataagatgcataccttttccccattaaagcgacagcatgcccggctttttcttttactttcttatcctttatttcttgagaagttttttttgcggattcaaacgctttttttgaatcatcaatactgtctttttctgctttcagatgtttttttcgctgatttgcattgctcagagcctgatcagacagtgtgacaattttctggtaatcatccatattcagtttaaccgcgctgtcgtatagctgatgctcttttttctccaatttttctaatgttttctgctctttttgaaacggtttttccgcttgaacggctttttccatcgagtcatgaagcgattcaaccggatcttttcccccgcagccggcaagcagcatacttgcggcgccgagcgctccgattcctgctaatacctttttttgaatcatattcacttaaaatcccccaatcttgacaatttccactatagaagcccgaacgctttttgacaatagctgagctgtaattggcatgaccgggtaaagacgcttacggtgctgtcaaagaatacttgcataaaaaattgagaaaacagggcggatgaccatacatctttttggcttttacatagtttatagtagacgccggccctgctgacagagggtcagcgtaattaaaagaggaggtttttttatgtacggatatggatttggcggcggatttggcggcggttgctgcggcggcggatatggttatggcggcggttacggcggttacggttacggctgcggcggcggatacggccgcacattcgcactaatcgtcgtattgtttatcttattaatcatcgtcggtgccgcttatttaggctgcggctgctgaccctatacaacatgaacatcggccggcctgctatggccggccaattgtttcgttgcgccgcgataaagaaattcgctataatttacatattaagctttaggagtgaagtttcttgattactatggaaaatattgtacgcgacggacatcccgcgctcagagagatcgctgaagaagttcagcttcccgcttctgacgaagaaaaacagcaccttgctgatatgattgagtttgtgaaaaacagccaaaatcctgaattagccgagaaatacaagcttcgtccgggcgtcggccttgccgctccccaaacagacgtaaaaaaacggatgatcgccgtccatgcagaagatgcgaaaggcactttatacagctatgctctttttaaccctaagatcgtcagccactcagtggaaaaaagctacttgacgagcggagaaggctgcctgtcggtagacgaacccattcccggctatgtgccgcgctacgcccgcatccgcgtaaaggcggtgacgcttgaaggagaacagattgacatccgcctcaaaggttttccggccatcgtgtttcagcacgaaatcgatcatctgaacggcgtgatgttttacgaccatatcgataaagaaaatccgttcaaagaacctgaaaacgccattgccattgaccgttaaaaataaccggcacttcccaaagtgccggttttctttattttaaaaggcccagttctttgacggcccagctgattccctcttcatccaccggctttgtgacgaaatcggcggcagcttttaattccggaaccgcatttcccatcgccaccccggtgccgacaaaacggatcatctcaagatcatttaatccgtcgccgaatgcataagtgtcacttacgccgtacggaagccgctcaagcactcttttaatgccttccgcttttgaaccgcctttcggaagcacatccgttgacaattcgtgccagcggacgtaatcaaactccggaaaagcggcatatgctttttcttcgtgtccgcggcagaataaaagcagctgataaatttcttttcctttataaaaagtttcatcaacttcgggataaggcgctttcagactgccgattccttccgagacgtgcggatgtccggggacggtcgttttcatcgtgtcttccgccataaatacgacggggtgctccccttctgccgcctgctttaataaacgcgcaaccgcatcttcaggaagcggatttttataaatgacctcaccttcaaatacgacatactggccgttgtatgaaataaatgattcaatctcaagctcttccagaatcggttttaccataaacggggaccttccgctggcgataaaaacgtgatggccagcctctttaagcgccttcacggcgtttcttgcgctatcgggaatatgtttatcatggtcatagatcgtaccgtcaatatcaaaaaagatcagttttggtttcatgtcaatttctcctttttcccgtttatcagtcgtgtctttttcaatatcatcatacagaaagtttttcttccggaaaaccgccttgatgaaattccagttttacccacgaaaacaaattcattttttccgcatactactgctataaagggctttaaaggaggtatacaatgctgcgccggttacggaagaaactcagaagacagtggggcggaatgctccggaaaaaagtcatcgcgtagaagggatctttcggtttttgaaagtcccttttttgctcgagactttccttataatccgttttcgaatataatagaataagcgagtctaacatacggcatttaaggagagatttggatgatttataaggtattttatcaagagaaggctgacgaagtacctgttcgggaaaaaacagattcactttacattgagggcgtttcagaacgggacgtcagaacgaaactgaaagatcagaaatacaacattgaatttgttcagcctgtggacggtgcttttttagaatatgagaagcagagcgaaaattttaaagtattggagttatgagcggaatgaaatttgtaaaaaatgaccagactgccgttttcgccctcggcggattgggcgagatcggaaaaaatacgtacggggtgcagtttcaggatgaaattgtactgattgatgcgggaatcaagttcccggaagatgaacttctcggcattgattacgtaatccccgattacacgtatttagtaaaaaatgaagataaaattaaaggtctgtttatcacccacggtcacgaagaccatatcggcggtattccgtacctgctcagacaagtaaatattcccgtttacggcggtaaactcgcgatcggcttacttcggaataaacttgaagagcacgggctgttaagacagaccaaactaaacatcatcggtgaagacgacatcgtgaagttccgcaagacatctgtatccttcttcagaacgacacacagcattccggattcatacggaatcgtcgtcaaaacaccgccgggcaatatcgtacataccggggactttaagttcgatttcacaccggtaggcgaaccggcaaacttgacaaagatggctgaaatcgggaaagaaggcgttctgtgcctgctttctgacagtacaaacagtgaggttcctgatttcaccatgtcagaacgccgcgtaggcgaaagcattcacgatattttccgaaaagtggacggcagaattatatttgcgacattcgcttcgaatatacaccgtcttcagcaggtgattgaagcagccgttttaaaaggcagaaaagttgccgtattcggacgcagtatggaatcggctattgaaatcggacaaaatctcggctacattacctgtcctaaaaatacgtttattgagcataacgaaatcaatcgtttgcctgccaataaagtaacaattttatgtacgggaagccaaggtgaaccgatggcggcgttatcacgcatcgctaacgggacgcaccggcagatttccattaatcccggagatacggtcgtcttttcttcctctccgattcccggaaacacaatcagcgtaagccgcaccatcaaccagctgtaccgtgcgggcgcagaagtcattcacggttcattgaatgacattcatacatccggacacggcggacaggaagagcagaaattaatgctccgcctgatcaaaccgaagttctttatgccgattcacggtgagtacagaatgcagaaaatgcacgtcaaactcgcgactgattgcggtatacctgaagaaaactgctttatcatggataatggcgaagtgctggccctcaaaggcgaagaagccgctgtggcaggcaaaattccgtccggctccgtttacattgacggaagcggaatcggtgatatcggcaatatcgtgctccgcgaccgccgcattctttcagaagaaggccttgttatcgttgttgtcagcatcaacatggacgactttaaggtttcggcggggcctgatttaatctcaagaggttttgtatacatgagagaatccggtgatttgatcaatgacgcgcagcagctgatttcgaaccatctggagaaagttatggatcggaaaacaacgcagtggtccgaaattaaaaacgaaattaccgatacgcttgctccgttcctatacgaaaaaacaaaacgccgcccgatgatccttccgatcattatggaggtctaaaaaaaaactgcactcattacgagtgcagttttttattgcagcggaatatgctgaaaggctttgacatcaaacagaccggccgctgtcattttaatatccggaatcaccggaagcgctaaaaatgataatgtgagaaacggattgaaatcaccggtgaatccgagcagaggaagcttttcatgaagcacgcccaagctgtcattgacccattccgccgacttatcagacaaaagcccggcgatcggaagcggaacggagtgaagcaattctccgtttttcacggctgttaatcctcctccggtgtcacggagcctgttgattgcttttgccaaatcggcatcgtttgtaccgacagcgatgatattatgggaatcgtgagaaatggttgtggcgatggcgccttcttttaacccgaacccttgtacaattccgagtcctatcattttttcgccgctgtgccgctctgcgacggcgatttttaataaatcattttctgtatcaggacgaaacgcgtcagcagacggtgcaggcacttctttttttctcgtctccaaatgattcggtatcatttcgattacattcattttcttgccttcttgaatcggtatatgaaaatccgattcagtcagcggcgctttcagccgcactgtatccaacagcgcctggtccggcgaataggaaccggcagactgttcataaaccgtgcgtccgttctcggcaacggtccggccggcgaccatggtcttcgtgacggcagcctcccgtacatctgaaatgaacagcagatctgcgtcaaaacccggcgctaccgccccttttgtttcaaggccgtagcactcagacgcatttaagctggcgagctgatacgcaaggaatggatcaagtcccgcctttatcgccattttgacttggtggttcacacttccttctgaaagcaggtcatctacatgcttatcatccgtgcaaaagaaaaagcgccgcgcgtttttttcattcaccgccggcagcacattgagcgtattttttgccaccgatccttcgcgcagcatgacatacattccccgtctgattctgtccagcgcttcttcttttgtcgtcacttcatgatcatttgacaccattgcggttctgtatatattgatgatatctgaagacagtccggctaaatgcccgtcgatccgttttccgtgacgcttggcatcaagcagtttctgaagcatatcctcttcaccttccgcaacagacacataatccattacttccgcaagtccgagcacctctttctcctgataaaaaggctttaaatcctcggcttttaatacggctcctgagcgttcaaagctagcggcggggacacaggaaggaagcatgaaacggatgttcagcggcgcctttttcgcctgctctatcataaaagaaatgccttttgctccggaaacgttcgcaatttcgtgaggatcagtaatgacagtagtcactccgtgtgggaggacggctttagcaaattcaatcggagtaaccatagaggactcgatatgaacatgtccgtcaataaagcccggaacgatcatttgaccttctgcatcaatgacttcttccccttcatattcgcccagcccgacgatcactccgcccgtaatggcgatatctgcagaaatccattcctggttaaaaacatccatgatttttccgtttttaatgacggtatcggctttttgtctgccggctgatgcgttcagccgttcagccagtgtttctttgttcaaaatgaggcctcctctttttctttatatggtacaatatgctatcggatcgcctgatcatagtcaataaaaatcgcagaaaatactgctcacacaataaatgtcttactattccgacataataaaagaccgtccttttacggacggcttttcactttgtatgaagcactcttttttcaaatcgggaaatgtccgtaagagagccgataacgatgagaatatcttctttttggatcatttcagtcgccaggggagatacgatcacttctttttctctcttgatggccacgatattaatgccgtacttcgcccggatgtccagatcaagcagtgtgttgcccgcaagcctgctgttggccacgatctccacaatgctgtgttcgtcggacagctccaaataatcaagcacattatttgatacgatgttgtgggcgatgcgttttgccatgtcacgttcaggatggacgatgtggtcggccccgattttcgcaagcactttctcatgataatcgttctgcgctttaaccgtgatcgtgttcacgccgagttcctttaagatcagcgtcgttaaaatgctcgcctgtatattttcgccgattgccacaatgacgtggtcaaagttgcgcagccctaagtttttcagcactgattcatcggttgaatcgccgatgaccgcgtgtgatgcgattttggcgtattcatttactttatcttcatcaatatccatcgccatgacctcaaggccttcttcacttaatgctttgcaaatacttccgccgaagcgtccgagaccgataacggcaaactcttttctcataacagtactcctttaaacaatatctctaataggaatagtatcacattttcggcaatgagttcatatagcgtttaagcttttctgaaaaggcgggcgataaatacaaatccgctccgcgttcgatttcttcctggtagtggcccggaggcgcaatttcctcagctttatcaagcacaagaaacgtcaggacgcctctgtatacacggccgccggcacacacttctatgaacgcgggacggtatgtgtggttatcaacaccttctcttttgtacagataggttgccgcttcaaacggaagcttgtacagcacgccttcagttcgtcccccatcttcaacaagatcggctctggaaccgtcaggacgccttaacgtgaatctcgtcgaatacccttcaacaaccgcccctccgaccggctcggcaaaaaagtgatcgacccccgcctgtttaaaccgggcattgtccatacaggagccgtatgcgaaataataaaccggactgtcatcctcccgtttcataaaacggtattctttccagtctccgcttttgatacggctgaatgaggcacactggtcgggctttacgacatatgcgaaggcggttttattcccggcatcagtcgtcacggcaacctctttccgatcaaaatcagcataatacgcatccagcttacggatcatctgatgatctgtttcatacaattccccgtacacaaaagctgtttctgctaaagacgcagcaggctgacctttatccgtttcgtacagcacgccgtttatcgcagcctgctcgcacacacacgaagcgcctttcagcagttcatggttttcttcacgcttccgtaacaaaccgtatacaaaaagaagcaagttatttttcctccttttggacagcagccgcttctaacggcagaatcacctgaaacgtactgccttctccatttttgctcttaatgttaagtttaccattatgctccttcagaattcgtaaacaaatcggaagaccgagacccgttccctgatcttttgttgagaaaaacggtttcccgatgttttcaagcttttctttcgacatgccgtttccttcatcctgtatgctgatcaccgcgtattcttcatcccgttttgtataaatatgaatattcccgccgtcaggcatcgcttcaattgcatttttaataatattgataaatacctgtttcagctggttttcgtcaccgttgaccatacaggactcagtctgcctgaaatccttctcaatcacagtgttcgacagcaccgcgttcgtgtcaagaagcgtcgccacctgccgcaaaatatggttgagatgatgagcggtaaacgtcacggtctgcggcttggcgagcagaagcagctcccccagcacgaggtcaattcttttaatctccgaaaaaataatatcaaaataatccgttctttccggatactgggctttcatcagctggagaaagccgctgactgacgttaaaggatttcttacttcatgggcgattcctgccgcaagctccccggcaatggccagcttttgagattgcatggcgaggcgttcgttcgtttccagaagctcgtcgaccgcttttttccgttcactgatatcagacatcgtccccaggcttccgacaaatttctgtctgcggtcataatacagcttataatggacttctccccaaaagatcgtgccgtctcttttaatatatttggccgtaaacattcctgacggggactgctgcttgatttgggagataatataatcaatgatatgtttttcttttataaagtaatcattatacatcgtgcccatacattcgctgatggagtggcccgtaatcgccgtccaggcctgattcaaatatgtaatattcccttgtgcatccgtctgaaaaacaatttcctgcagattgtccatgatccggtttttctcatctgaaagcgcctttgctttctgctcgctgtccttcagctccgccagcagctgctttttattatccacataataagccagcagccagacgctgattaatgtgacggcggtaaaggtgatgtcaacgggccagttaatcggattccgttcaatcatataaaataaataatcccaaaacataataaaaatcattgccaagattaaggaaatgatacgcgcttgatattttcccatagtcccacctgccgctagcatttctacatatattgtaacattgttgactgcattattgactaaaaaatgataactattcccaattaattgagcaggttcgcttacttttcccgtgagtttttgcacaagttcataataaaaggacggaatgatgctccgccctttttgctgattatgatctatcttttaatgcttcctcgatttcctcaagcagcattttcgctccttcaggacttaaaataattttgccgttgccgtactcctgattttcgggagtaatttcccccgtcattaagcaaatgccgtgcggcttgtattttttcaagacaattttgtctccgtcaacgaaaaattcaatactatctttaatagcgatatccaatgctcttctcaattcaatcggcatgacaatacgcccgagttcgtctacttttcttactacaccaattgatttcatagaaatcccctacttcctttaatgtctcttctttatgtccaaggaaaatccttcataaacgtagacgaaaggaacggagcaaaagtttctcagcatccggaactgaatgtttttttacagaagaaaatccttttgaaatatgggatacagactttccctccttttttacaaaaacatttcattcccggcggaaacccccaaaaatcgtgttttttctcagaaactttaaatgtagaatcaattaaatcaggatagggattgggtgaaaacatgtttcaatcaactgagatcggaatcgacttaggaaccgctaatatacttgtttacagtaaaaataaaggaattattttaaacgagccttccgttgtcgctgtagatacaacaacgaaagcggtgcttgccatcggaacggatgccaaaagcatgatcggaaagacgccggggaaaatcgtcgccgtacggccgatgaaagacggtgtcattgctgattatgatatgacaactgacttattaaaacacattatgaaaaaagccggaaaaaaaatcggaatgaccttccgcaaaccgaatgtcgtcgtctgtacgccttcaggctcaacagccgttgaacgccgcgccatcagtgacgctgtcaaaaactgcggagcgaaaaacgttcacttgattgaagaacccgtagccgctgcaatcggggccgacctccctgttgacgagccggtcgcaaacgtcgtcgtagatatcggcggcggtacgactgaagtcgcaatcatctcattcgggggcgtcgtatcctgccattcgatcagaatcggcggcgaccagcttgatgaagatatcgcctcgttcgtcagaaaaaaatacaacctgctgatcggggaacgtacggcagaacaagtgaaaatggaaatcggctttgcattgatcgaacatgtgccggaaacgatggaaatccgcgggcgtgaccttgtaaccggtctgccgaagacaatcagactgcagtctaatgaaattcagcaggcgatgcgtgaatcgctcctgcatattcttgaagcgatcagagcgacacttgaagattgtccgccggagctcagcggtgatatcgttgaccgcggcgtcgtgttaaccggcggaggctcccttttaaacgggatgaaagaatggctgacagatgaaatcgtcgttcccgttcatttggcggcaaatccgcttgaatcagtggctatcggcacggggcgttcattagacgtcatcgacaagctgcaaaaagcaattaaataataagattgtgcttcttttttctccagccggctcatattgtgagaactggagaaacattaaggaggaagcatatgcttagagatgtgggaagacgcgtagcagtagccgtcattttaagcggaattattctggggggtatgagcatttcactggccaatatgccccattctccggccggcggtgccgtaaaactaaatcacccgtaaagacgcagcaaaagctgtgtctttttcgtttgtgctcctttctttcctttatgaggcgatatttgatatgatgagaaaaaccgatgaggaggaatgaacgatgagttcgtttactgaaaagttacatacatatgctcagctggcggtagaagtcggcgtcaatgtccaaaaaggacagcatgtcgtaatcaatgcctcaactgatgtccgggaacttgtcagactgcttgccaaacattcttatgaaaaaggcgcaaaaaacgtcaccgtaaattggcaggacgatgaactgtccagattaaaatacgagatggcaccttttgaagcgtttgaagagtatcctgaatgggaagcaaaaggcaaagaagagctcgcgaaaaaaggggctgcgtttatttctgtcgtctcatccgaccccgacctgttaaaaggcactgacggcaaacggattgcagcgttccaaaaagccgccggaaaagcattgcatacatacagacaatatattcaatcagataaggtcagctggacggtgatcggagccgcttcaacaggctgggcgaaaaaagtgttcccggatcagccggaagaaacagccgttcagcttttatgggaagaaattttcaaaacgacccgcgtaaatgaagaaaaccctgtggaagcatggaaaaaacatgatcaaaaccttcatgaaaaagtggaacacttaaacaaaaaacattacagcgccctgcattatcaggctgaaggaacagacttaaccattgaactgccgaaaaaacatgtatgggcaggcgcgggaagcgtgaatgaaagcgggcacgaattcatggccaacatgccgacagaagaggttttcacccttccgcagcgtgacggggtgaacggcatggtttccagcacgaaaccgctgagctacggcggcaacattattgataacttcactcttacctttgaaaacggccgcattgtcgatgtgaaagctgaaaaaggcgaggagattttaaaaggcatcgtcgaaaccgatgaaggctcacactatctcggagaagtggccttagtgccgtacgattcaccgatttcacaatcaaatattttattttacaacacactgtacgatgaaaacgcctctaaccacttggcgatcggcagtgcgtatgcctttaatattgagggcggtaaacaaatgacacgggaagagcttgtcaaagagggcttaaatgaaagcattacacacgtagattttatggtcggttccaaagatatgaatatcgacggcattacggcggacggcaaaagagaaccgatcttcagaaacggaaactgggcaatttaataaaaaaaaggaggcgattaggcctcctttttttatttcgcttcatacatttgcaagttggcgcagacggtttccaaaacaggtgtatcaactgacaagcctttcgctttctcaagcaaaaatccgtgtaaatgatcaccttccgtcaccctgcccttttccatatctctcagcatcgacgatttcatatggtaagacatgcttgtcaatgtgcgataactctcttcttccagaccaggatctttcgggatgccggcagccttgaaaatggctccgatttcagcaaagaggcgctttgccgttttgcggccgccttctgtttctaaaatcggtccgaccggctgttgaaacagagtggtcactcccgcctgcgcggcaataaacatatattttttccaaatgtccttttcaatatcccggctgatgatgacatccgctttcacacctgcaaatgcgttttccagctcattcatacgttccgtgcgttccccgttccattcaccgaaaacaaagcggtgggcagcgctcgtatgaagaatgtcccctttgtcgttaagggcgctctcaataaagcagaggccgcccagcacctgccgttttgaaaaagcttcaaacagctggttatagtgcctgtatccgtttaaaaaaggaataatgaccgacgaaggtttgacaaacggtttgacatcccgaatgacgtcctgcaaagaatacgcttttgaagcgatgataaccgcgtcaaatgctccttcttcgcccgccatcattaatttcggcttgattgaaacatcaccttttgcacttttgacggtcaaacccgtttcttgtaattgttccgcccgtttcttgcggacgagaaacgtaacgtcatttcccttttctgcaagacgcgcgccgatatatccgcccactcctccagctccgacaattaaaaacttcatgatgcattcctccgtctcttttcaaatatgtatttcatttattgtaacgggaagtcagaagattgaaaacttttttcataaataaaaaagcagagtctcccctgcttctttattacgcgtatagctcttcaagctttttctgtacatccgcgttttcaagaaattcgtcataagacatttgtttgtcaacaatgcctttaggcgttaattcaatgatgcggttggcaattgtctgtacaaactgatggtcatgagatgaaaacagcatagcgcctttaaagctgattaagccgttgttaagcgccgtaatggattccaaatctaagtggttggtcggttcatccagaattaagatattcgcgccggaaagcatcgcttttgaaagcatgcagcgcactttttctcctccggaaaggacgtttgattttttgttgacttcttctcctgagaacagcatgcgtcctaagaaaccgcgaagaaagctttcactttgatcatgcggcgagtattggcggagccagtcaacaaggttcgcatcgctgccgtcaaagtattcgctgttgtctttagggaagtacgcctgagaagtggtcacgccccatttaaatgtgccgctgtctgcttccatttccccggaaatgattttaaacaatgttgtaacagcaagttcgttgcggcccgtaaaagcgattttatcttctctgttcataataaagctgacgttatcaagcaccttaaccccgtcaatcgtttttgttaagccttcaacccgcagcacgtcatttccgatctcgcgttccggcgtgaaattgacataaggataacggcgtgatgacggtttgatatcatcaagcgtgattttatcaaggagtttctttcttgatgtcgcctgctttgatttagaggcgttggcgctgaatctggccacgaactcctgaagctgtttaatctgctcttcttttttcttgttggcttcctgagaaagctttaaagcaagctggctggattcataccagaaatcatagttgccgacgtacacttgaattttattaaaatcaagatcggcgatgtgcgtgcacactttatttaaaaagtgacggtcatgggatacgacgatgactgtattctcaaagttgattaaaaactcttccagccactgaatcgctttcagatccaagtggttggtcggttcatcaagcagcagaacgtccggcttgccgaacagcgcctgtgccaaaagcactttcaccttttctgaaccgcctaagtcagccattttcttcgtatgcaggtcttcagagatgccgagaccctttaacaaaatagcggcttcactttcagcttcccatccgtttaattccgcaaactctccttcaagctcagcggcgcggatgccgtcttcatctgaaaaatcaggcttcatataaatcgcgtctttttcctgcatgacttcgtataaacgtttatgtcccataatgacgactttcagcacttcgaactcttcatattcaaagtggttctgcttcagaatggcaagacgttcgcccgggctcatatggacatcgccggtctgcggctccagctcaccggataaaattttcaaaaatgttgattttccggcaccgtttgcgcctattaatccgtagcagttgcccggcgtaaatttaatattgacatcttcaaataacttgcgatccgcaaaacgcaagctcacattatttacagcaatcatttagaatcctccatcgtgtctatcatcattaaaagtataccatgaataaaggggaagagaaatgtttccctgcgaatatacgggtttgaaagatgcaggcgtcaaacccgaagccctgtgatacaatagatatatatacatattcatcacggaggaacaagttgaagcttttaacactcacagaatactgtcttatgattttcttcaccggggtttttctggccgtcacaggctttacggcccgtgacatcggcttgtacgtcggaatcgccctcatttatacgttttcgcatctcttttcaaaacggatgcttgaaaaacgcggcaaagagaagaagcaggtgaatctttttttcagcgttctggccattgtcggatcagtgctggccacggtattgttcatcgccgtcgccgcctcgtttgccaaataaaaaacgcctgctgtccaaatcggacagcgcggcgtttttattttgtctgacgcatatcatgaaacgggaagaacacaaacttcgaggtgccgacgatccggttttcggcaattaaaccgagtccgttccggctgtccattgagttcagccgattgtcgcccatgacgaagtatttgcctttcggaacctttacggggccgaaatctcccgtcaggttgactcccagttttttcgcttcttttttattgctcgcgaggtacggttctgcgatttttttgccgtttatataaagcgtgtcatttttcatttccaccgtttctccaggttttccgatgagccgctttacataatggactttcgacgtatcgccgttaataatgacgatgtccccccgctcgatttctccgatataattgacgcttttgttgacaaacagcctttcaccgtcatgtaatgtcgggtacattgatgatccttccactaagtacggttcaaacaggaaatggcggattaacagcgcaagtgcaaccgctataatgatggcctttccccattcccaatatgtgttggattttctttttaccgatttttcagaagtaggtttttgttcttcagtcaacgtggttcctcctagacgatcactgttacggtttcatgtactatctttactttatcacaactcatcacaaaatacataacgcttctatgcgcacatgattgaaaaaagcgcccgtaatggacgctttttgcttatttctctactaccggttttttgacgattcccaagataaccgccgttacaatcgctccgatcacgatgctcattaagtaaagcagcggatggttcgtaatgaatgcaacgaatattcctccgtgcggtgcaggaagcgttacccggaaaaactctgtcagtccgcccgctaccgcagaaccgacaacggctgcagggatgacgcgaagcggatcagccgctgcaaacgggatggcgccttctgtaacgaaagctgctcccatgaagtagcacgtaataccggcttcacggtcacgtttagagaatttatgtttaaagaatgttgtcgccagtgcgattccaagcggcggagccattccgcccgccatgatggccgcatgcggcgcatagtttccggcatcgatcatcgcaattccgaaagtgaacgccgctttattgagcgggccgcccatgtcgatagccatcataccgcctaaaataatacccattaagacaaggtttccagttccaaggctttcaagccaatttgttaagaaattcataaacgctgcgacaggtgtgtttatgacaaactgcatcaggacaccggtgataaaaataccgagcagcggataaatcagtacaggttttaatccgtcaagagtttgaggaataaagacaaacagctttttcaaaaggactacgacataaccggctaagaatccggcaatcagtccgcccaagaatccggcattcgcctgcgtagccataaatccgccgaccatacccggcgcaaatcccggacggtccgcaatactcattgcgatgaatccggcaagaactgcaacaatcagttttaacgcattatcgccgccgataaagttcagcgctgcggcaaacgtgttgtatgtcgggtctttcggatcagctgaatgaattccccagaagaatgaaatcgcaacgagaattccgccgccgacgacaaatggcagcatgttgctgacaccgctcattaagtgtttatagaaagtgcttccgatacttgtgcctgatttctgtttcgggccgtcttcatctgaagcggaagatcctccgccgctgccctcgtaaatcggcgcatcttggttaacggctttttcaatcagttcctgaggacgtctgataccggccgtcacaggcacttgaagaacatgtttgcctttaaagcgttccatttcaacctgtttatcagccgccacgatgatcgcaggcgcgtcttcaatttcttgagccgtcagcttatgtttgataccgcttgagccgtttgtctctactttaatgtcaacgccgagctctttcgctttttccttcagtgcgtcagctgccatgaacgtatgggcgatacctgtcggacatgccgtaacggcaaggattttgccttttcctgacggcgctgcctgttcttcctgctcttcttcttcctcatcgtcatctttgtcatgctgattgatgatgtcaatgatcgcatcttctgattcagcttcaagaagctgtttgcggatttcctcacgcataagaagcgttgaaagtcttgataatgcctcaaggtgcgtattattcgctccttcggttgccgcaatcataaagaccaggtgtgccggctgaccgtctaatgattcataatccacaccatcttttgaacggccgaatgcgatggccgggttaatgacgctcgccgtcttcgcatgaggaatggcaatgccttcgccgattcccgttgagctttggctttcacgatttaaaatggctgctttgtaagcctctctgtcatttaatctgccggctttgtcaagcactgtcaccatttcatcgataacgttttctttctctttgctttctatattgagatgaattgtatctcttgttaacagctcagttatcttcacttttctttcctcctctatagacgtgtgactttaacttcaggaagaagctgctgtacaaactcttcagttccgagttcttcagaaaatgccgtcgcgcttccggaagcaactcctaaacggaacgcatcttccaaaggcagctgttttgaaattcccgcaaggaatcccgcgacgacggaatcacccgcgcctaccgaattgacaagcttacctttaggaacattggcgaggaaaaccgcctctttcgtaaataaaagcgcaccgtcgccagccatcgaaacaatcgcgtgttcagcgccttgttcaatcaattttttaccgtaaggaacggcagcttcggctgaatcaatgaccgtattgaacatttcgctaagctcatgatgattcggcttcatcaaaaacggtttcatttctgtcgctttcatcagcgcttcaccggagatgtccacgactacccgggcattctgctttctgcatgcctcagcaattttttcatacgtgttatgcggcagggaagaaggaatgcttcccgctaaaacgacgatgtctccctcttccagagcggagaactgttctaaaaaggtattgaacacttcgtctgaaatcgtcgggccctgtccgttaatttccgtttcatcgcccgttttcagttttacatttatacgcgtgtcttcatccacctcagaaaaagccgtttccagaccttcctgctgcaaaaatgacgtaatataatttccggtaaatccgccgacaaaccccaatgcttttgacggtacatggtgtcttttcagtaatcttgaaacgttgatgccttttccgccgggatacttcgtgtcatagctggaacggtttaaaccgcctacggcaaaatcttcaacgtgaacgatatagtcaacagacggattgagggttacagtgtaaatcatggtttcactacctttacgacagttttttcttggtaattatcgaatgcaagttcttcagcttcagtggtaatgatagctgcatcgcccaaggcggcgaacgctgcgaaagaaatttcgccgaatttagaaggatcggctaaaacatacgcgtttttcgcctgtctcacagcctttgtcttcagaagagcctcatccggatcgggtgttgtaaagccggcttcaatgtgcacgccgttcaccccgaggaagcttttgtcaaaacggtactggctgaccgccgttaatgaggcgccgccgatcatcgcacctgttctatgcttcacatatcctccgagaagataaaaaggaatccctttccttattaaagcgtcgatatgcataactccgtttgtgacaaccacaatgtcctttgtatgatctataaaatcaatcatgtgcaatgtagttgttcccgcatcaagataaatacagtcaccttcttctaataaagatgccgcttcttctgcgatcttcagtttatcttgaaggtttttggaggatttttcaagcatatcgggttcttgcctgctgttggaaagtttagacgccccgccgtgaacgcgctttaaaaatccgcgctcttcgagtgttgataaatctcttctgatcgttgattcagaagcatttgtcatgcttatcagctcttgaatcttcaccacatcacgcttttcaatctgatcaataatcagctgatacctttcaggagtgagcatattccgcctcctttggaaacgtattcatttcggttgcaagataattgtaaacgctttttttacttctagcaactaaaatcactcaaattcattcaataactatcaaaatctttcacatttgttcatattaacgtatgtacatagggtttgtaaactgtaaattcgacaaaaagggggacaattgtatgacattttctttttatcataaatgaaaaaagtctattatattcattcaatcattaaaacacaaaaaaaccccatgcagactgcatggggtacgggttattcataccgtaacgcttcaatcggatctaagcgtgatgctttgttggcgggcagcatgccgaaaatgacaccgatcagcatactgaacagtacgccgatacaaaccacctgccaagaaacgagcgacggccagcctgcgataagggaaacgagtgatgctcccccgtagccgagaccgattccgattaagccgccgattaatgtaagcacaacagattcaattaagaattgtgtcagaatctgtcctctcgtggcaccgagcgatttgcggatgccgatttctcttgtccgttccgtcactgatacgagcataatattcatgaccccgatcccgccgacaatgagagaaataccggcgatcgaaccgatgatcgtcgtcatgacggtcgtgacctgaccgattcccgccgcgatttcttccatattcataacttgataggcctcttttgtaccgtgattgtcatttaagagacgggccgcttcttttcctgttgatttgatttgatcagcggactccgtctgaacggaaacgttgctgtagtcgttagtaccgaaagacgttttcagcatgttgaacggcacatacatttcactgagtcctaacgataaaaaaccgctctcttctttcagtacgccgattacttctacgggctgtccgccggcccagacgatttttccgagcggagacgttttcccgaacagcttttcagccatttttttcgagatgattcccgctcttttcccggaaagaaaatcattgtccgtaaatgtccgtccatcttgaacgtccagcttttttacgtccatgtagccgctgttaatgccgttcagcgtaatatccgtgtcttcttcatggtaacgggccgtcatggattttacagcggaagcgacaacctgctttacgccgtccactccttttaatccattaatatcttcttctgtgaaactcgcttcctgtaaggcgttcggattggctgttaattcttcatcactcggaaggtaaaacaattcaatcgtattgcccggcccgctgatggattgcttcagcatttgctctccgccttggccgacagccacaacaacgattactgaaccgacgccgataatgattccgagcattgtcagaatcgatctcagcttgtgagctcttacggaactgagggccatccggagattttctgacaggctcattcccccactctcctctgctcagcatcgcgggaaacgatcatgccgtcacggacgaaaatcactctgtttgtacagtccgccacttcaggctcatgagtcacaagcaccacggtcacgccctctgcattaagctctgtgaactgctccataatggaaatgcttgttttcgtatccagtgcgccggtcggttcatcagctaaaatgagcttcggttcgttcacgatggctcttgcaatcgcgacacgctgcttctggccgcctgacagctcattcggcatgtgacgcatccgatccgccaaaccgactttttccagtgcatactcagcccgttcctcacgctcttttttgccgataccggcgtagatcatggggagttcgacattttttcttgcattcaatcgcggcagcagctgaaactgctgaaagacaaatccgattgatttgttccggaccgccgcaagctctttttcagtgcatgaagaaacatcttcgcccgcaagcctgtaactgccggacgtcggtctgtccagacagccgatgatattcatgatcgtagatttccccgatcccgacggtcccataattgacacatattctccttcttcaatcgtcaagtcgattgaacgaagaacatcaaacgtctccttgccgatctgatagctttttttcacctttgaaagctgaatcatctatgctttcacatccgttccgtcagtcaaatcgtcagccggattcagaatgactttatcatcctttgaaagcccctcttttatctccgtaagctgatttgcggtatcgccgactttaactttcacgcgtttggccttcccatcttttaccgtaaagacccagtgctcatctccgtcttttttgactgcggaggacggcagtgtatcggctttccgtttgtcggtttcaatgttcataattaatttaaaccccggcttgccctccggaaggtttccgatcagcttaacctggaacggatactgcacggcctgttccgtactttccccggaagcagcgcttgacttttgatcaggaacgaggccgacagccgccactctccctttccacgttttacctggaatggcgtctgaggtaattgtaacgctttgtccctttttcactttcagcgtgtcgtattcggacaaattgccggcaacgatcaggtgttccgggtctcctatatgtataaccggttcttgaatatccgattttttagaagccgcttcttgatttaccgagataaccgtcccgtccatctcactcttaacattgagattcgccacttgattttcaagagactgcttttgcaaatcagattgctttaattcgatttcagccgttttttgctgaagctgcagatcagtccgttcggattcaatttgttttttggcttccgcttctcccacttgttttgccagatcttgttccttgctgtttaatgctctgagtttttcttcaacttgttcgatttgcatacgttttgattgttctgtcaactcattttgttctttatcaagattgagctgctcatttgtatacgtgactaacgacgaccctttttttactttgtcgccttcttttactttcactttatcaagagttcctttatctgcttcataaaaaacatactgttctttagagaatttaagtgttcccggaaccataaccgtagatgagatttctctgttttccatggttccggtttcgatttttttcccggcgctgccgctcgcgggagcggcagacttataaatattgataccgatgaatactgcaacaattacggcgatgccgattccgatccaaatttttttcatgttatacacctgctgtcactgaacttaacagtcctccgactgccgaaaccaaaagcataataacaaacaggacaatcgcggaagtccaggccgctttttttgaaatgccgcctgtatagcgaagtcccaaagcgagcagaatatagctccagatgctgaaaatgtcgaacgcgcttaaaaagaccgcgacgccgtctccggccggtatgacactcgccaaagatgtaacggcgtacagtgagcccgcaccggtaaaataagtaacaagaccgttaatagctaagccgatattggtaataaatgccgtaaacaggctgagtgagagcatttttttgtaagttgtcacgccgcctgaaattttgacgcacagccagtaaatgagcggaacgataaacagagcgataatgcccccgaagattcctccgaacatcgtgccaaatttagcgaaggttttggtcatttcaatctgatcatccgtcaaaccgtcaagagatgggctgttcagcacttcttcataattcatccccagtccgcgcaaaatactgccggccgcgatgagaatgatgacaatcaggagaggaatgccgatgaccggcttttcttttaatcttttaaactgcacaacaggacttgtaatgacgccgaaaattgacggcttttccgttactgccgtattgcctttttccaggtttggttccatattgctgatgcctcctatgtattattctgtttatacgtacgctttaggctgagagaagtttcaatttttttgccgtttgcgtatttatgctaaattgtaacacaaattctcagctttacgttccataattatgtaaaaaaaagcattgtcagtccggtatgacgggaggctcaaagccttgtaagggtactgtcttcagcctattcatgtaatcaaaaccgcctcaaccacaaatccctttaaatcccatttagatgttctctggaattcagcttctatatacaaaaagccggatggcaatgatgcacatccggcttttttttcaccctccgcttacaggagggataaaggcaatggtatcaccttctgttacgatgctgttgtcttttacatatgtttcattgattgcgatcatggcattgtcaatcgtctgaaggccgtaccgttcctttagcagcgtttttacagcagacgccaccgtctctttttcgtcaagttcaatgaccggtgttcccgcctgctccgcaagcccggcaaacaataatactttaatcatcgcgattcccctttatccaaatccggttttccattcggatagggcgttgtttccagctgatcgcctatccattcttctccgtcttcccagatttcttttttccatatcggcacaatctgttttatccgttcaattgcatattcattcgcctcatatgccgcctttctatgcggtgaagacacggcgattacgaccgctgcttctccgatatcaaggacgccgacacggtgagtgattgcagcttcggctccttcccatttcgcactgatttcatcgccgatttgagaaagcatttgaacagccatcggttcatacgcttcatattcgagccgtaccgtccgccgcccggcagtccactctctgaccgtgccgataaacgttgtgatggcgccggcttcacgcttttcaactttttttacgatattttccgcaatgataggttcccttgtaatttgaaaacgttccatttaagcagattcccctttcagctgtgaaagcacaaacatcatggcagccggatcgtccgcatggaatacgggcatgcctgcgtctgccggcatatgttccgtatttctgctgacaactgcgatcacgcgctccaaatgcttcagcttttgccaatcttcgctgtctttgatcataatgattttcggatgcggcgcatgtttaaatccctctatgagaagaccgtcaattcccagacattcatacagactgatcaaacccgccaaatcccatttttttcgcgccgtaagctgcaggacgccgtccccttctactgccgtaaccgcggctccggcctttgaaaaacgctccgagtcttttccgtcagaaaaaggctccggttctccgccatgtccgtgatgttttaaacatccaatatcgcactctttcggcgccgctttcagcacacgttcaataaacgttgttttaccgctgttttgaaaacctacgatctggacgatcgggaaagaattgaccacggccattcacttccattctcatcacggatgaggagcgcgtgaaccgtccggcccgcttcataccccctcgttcctcccggcagaaggataaacgcgtttgcttcggctagagatgtgactgagcttgatttgtcgagaccgaccggtgacgccatcatttttccgtccttatgataaacaaacgccctcacaaatctcgtaaacggattcggcttcggaaagtcgtttgttaacacggcttccgcccatccggaatgaggtttttcattcagaagccacgtctgaatcatcggtttgacaaacagggtgaatccgacataacatgcggacggattgcctgaaaggccgaacagcagcatgtcatcggcccgggcgacagttgtcacgctccccgggcgcattgccactttgttaaaaagaacttccgctccgagcttattataaatgtctggaagaaaatcaaaatcgccgactgacacgccgccggtcgtgatgagaaaatcaacttttttcatagcttccttcaccgcagcatagctgtcatcaaaatcatcggaaattttccctaagttcagcggtaccgcgcccgcttcaatgatctgggcatacaccatggcagcgttgctgttgcggattttccccggctcaagcggatcgctgacatgaagaagctcggttcccgttgcgataatgccgacaaccggctttctgaccactggaacagaagcatagccgaaggttgctaaaagagcggttacgcccggcgtaattttcgtccctttttttaatagcgagctgccttttttcgcgtcttctccttgatatgaaatattatcacccgcatgaaaagggcgtttcactgacatgtaattcgtcccattttcagaaaacgtttttgtcagctcaagcatcactacggcatccgcaccttttggaatctgcgcccccgtcataatgcggaccgcttcataaggcccgagttctttttctgacacggcgcctgctccgatatggtcaatgacttcaaaggtgacggcattgtcacgggaagccgtttttgaatcgctcgccctgatggcaaacccgtcatacggggaacggttaaaggccggcacatcatgatccgccttaacatcctccgccaaatagcggtggagactgtcctcaagcgccacccattcggtatccccctgttttttataccggctcacccggcggactgcttcgtccacctgaatcggcgttcttttttcaagcatagcaatatctccccttcctacagtccgatcaccctggccagaactgaatttgcttcttttatatcgtttgtaccgtgaatcaaagcccgtccgtcctgaaaaataacgattctgaagcgctcatacgccatgtgcagcagaaattcatttgcttccactttaccgatctgcttcagacgtttgacaagctcttctttatccagcctctttaaggcttccgatctgatttgaacggtgtctcttccgcacagcacgcttgctttcggcctgttttcaggctgcagatacggatatacgggctccgcgccgcaggaagggcaatgatcccgtttgatctgatccacacttatgctcatattggtgttattccacacgtcaaacgtgaaaaagcgccgatttaccgccgcatgatttcctgtcagcaatttcagcgcctcagcctgctgataagcggagacgatatgaaccgccggaggtatgatgcctgctgtatcacatgtcgctccgcccacgggcatttgctcaaacaggcaggataaacacggcgtaacccccggaataatcgtcatgcacattccctgactgctgacacaggccccgtaaatccaaggtgtttccgttttcaacgccagatcattgatgaccattctcgtttcaaaattatctgtcgcatccacgatgcaatccgcttgttcgatcagcggttcgagcgtttccgccgtaccttccgccgcgtaagcatcgatatgtatatcactgtttaccgccaaaagacgcgccttggccgccattgctttcggcaggcgctgtctcgcgtcttcttctgtatacagctgctgtctttgtaaattgctccattccacataatcccggtcaataatcgccatacggcccgctccggctcttgccaaaccctctgccgcggctgttccgagggctccggctccgacaatcaggacactgctgtcagccagcgcctgctgccctttttcccctatcggcttaaatcttgtctgccgcgaatagcgctcttccatctgtgttgtccccttgcatttttatttccatcataccatgtttcttcccgatcagtcctgatttgaagactcgacacgcgccaaaagtctggtgtaatcgtcccgtgtgttgatattagcgaactcctccggcccggcgccgatgtcttcagcctgcacataacagacagacagccgtttcagcgtgtctgtcattttcagtttgttttgtgtcagctgatcaaaaagcacatcctgcacccgcttatgataaaccgccaagaggggctgctctctgttttcacaaaccggtatgacagcgtccaggtttccggtcagcttcatttcaagcgccgccatcgtttttcttgtcacgagcggcgtgtcacaggatatgaccgtatatatttcgccttccgtttgtttcattgccgtatagatgccggcaagcgggcccattccccgaaaccgcggctcatcggccaaaacatgccgctccctgtttgataagaacttttttatatgctcagggcggctgataattaccgtttctccgccgccgaaggcttttttcgcctgttcataaaacatgccgcccttccactttgcaaaagctttcggttctccgaatcttcgggaagctccccccgctaatattacattcacccgtttcatgtcatctctctcccattctatataaaagcatagcaaacgcctcagccgaaatacaatattacggtgcttgtctgtttaattaagaggaatagccgttgatcctttcccatattgtagtgttaacatcatgagggagatggttcttatgaaaatatccggtccgtttttccacgacacttctcaagagaacctttacttgaaatccgaactttccagatgcagaaaattaatttcagaatttgaagcaagctacttccatcaaaaaaataataagcttcaggaggaaaacgccaatattaaagagcggcttcacaagctttctgacgaattgaaagccatggctcaaaaacacaaacagacaagtgacacggaacgttctttgcatgaaatcagagccgggctgctcgataaaatcgtcattctgcaagaactgcttcagcaggaaacgtttcggcggaaaaatgagatggaagaaaagcaccgtctgcatcttacaaatgtaaaatttgaagaagaaaataaaaacttacatacccgcatccgctcacttgagaccgccattcagactgaacggacttctcacgaagatatgaaacagcgttatcatgccgctgcagacgaaaatacccggctccaaacacaaatgatagaaaaagaataccagctcaaacatattaaaatagaaattaatcatatgagagatcgaatactagaaacaaaagaacggcttgtagaaatagaaaaaacgaaagaaaagttatttcaagaaaccattctttcgtataaacggcagctggacgaaagtgatgcttggattgccggccattttgctgatattgacagccgcacggcggaaccggcggaacgagctctggaaatcccttctgtttccaaagagactgttcaggcagaagacttgcttaaagccgttaccgaacaagtcatctccctgcaaaaacaatttgtacaatcagagtcccgcgatcagtcgtttgatgaaaaactggatgcgttgaaagaacgtgctgacggcgaaaagcctttccaaaaatatgtcgtcaagcttgaaaaaaagccgggaaaagatgcgtcacttccgcagaataagcgggaaaacgcaaaaaaactgcttgagtaacgcaagcagtttttactgttttattattcagcagccgtatcatttgccgtttctgctgtttcctgagaaatttctccctcaagaatatattggccgcggtatggttttttcacttccggatacattttaattaagctttgcataaatgttgtcatattaggaatttcaaggccgctttccttttcaatttccttttgcagttcggaacttttgatcgctgcattgtggcgtttcaatgttttaatcgctgcttcgcgcagttttgccgcttttgatcccggtctcgccgtccctcttcttcttcttgtagaaccgtctggaatgccggcgggaagagacgtaatagactgcatctgcggctgggaggattgaggctgtgtctgcggcttttgatagcttctcatttcctgtgctgcaagctctgcaagcaccgggagagagtcactttttttctccggacgaaactctttttttgtatcggacaggctgcctgtattgtctaattctctcagttttgcatatattttatcacgttctatttgatattcacgaatgacttttacctctgcttcgttcaattgttctaaacgtaagcgcagcgcttctctttcattaaacatgtgtaaaaccccctgtcaaaaatttaaacgcttttattaagatattagattacaaaagtaattttatcaactattattttatcattttactattttatttactctatgaaaaagtgcttattttctgaaaatggtactttatatacaaaaatcccttatcatataggggattctggacaaagttccaatttattcaaccatttcaaaatataacttgaaattacttgcttaatgaaaattagcgtaatatctacaattttcgactataatatgtaaaagattatgatatggataaaacaagcggtacagcgtgtttacggctgtttctcttattttttaagccgcacatggcatattggaattttttatccaataggcacaaaaaaaccctgttacctaaacggcaaagggtttgcggaaccgagacaatagtccggcggagattgtcccgattactcagaagcctgctccgattctgaaagtactcggctgacgcgtttttcaagcattttcatcccgcttcctcccgcttgaaaatggcggagctgtccgcttttatcaaaaacgtaataagccggcacatattcattttcaaatgcttcagtcagcgtatgattgctgtcgacataaatcggctgagagatatcgtgttcagccgctgtttccttgattttctcaaggtcaagatcatcttcggaacggggcatgtgaacggccaccacgttcagctgatctttatatttatcacgaaattcgttcatctcaggcatcacttctttacacatgcggcagctggcggaccagaagtgaatcagtgccggttttccgccgaccagctgttccttcgtgacttctctgttaatccatgctttagcgcctgtcaattcaggcatttgctgacgtaatttcatcttattaccctccttatgaaaaaggttttgccggggctttcagtttcgccgggcaacgttctcctgttttccctccaaaggatatgatttggctgaatcaccatgttaaaatgagtgtggcgatttcttagttcatatcttcacaaaaatgatgatattgaaaccgggcaatatgaacaaatcttaaatgaaataactgatttctattaaaaggtttattttattttaaaaacgggtatatcacttttagctttttctgcaatagacttgaaaggaagacatcactatgattgatttaaaacactttgattgggccgggcttctcacatctgccgggattttcatcataaagctggctctcattattttagcgtactttattttccggacggcaggaaaaaagctgatcaagcatctgtttcagaaattcgagctacaaaacaacctctccacaggccgcgcttatactttgcgaagcctcgcgcttaatgtatatggatacatcctgattttcgtttttatcgtaatgattttggatttatttcactacaatccgagcgctctcattgccggcgccggcgtggtcggtctcgcagtcggcttcggggctcaggggctcgtcagtgacatcgtcaccggattttttatccttttggaaaaacagatcgacgtcggcgattatattacggttgccggctacagcggcattgtcgagcaagtcggtctccgtacgacgcaaatccggagctttgacggcacgcttcactatcttcccaaccggggcattacgaatgtgagcaaccattcccgcggaacgatgcaggcgcttgtcgatattaaagtgccgcttgaaaaaaatcttgatgaaaccattcaaatcctgcaaaccgcgtgtgacaaagcagccgctgagctcccgcagattaaggaagggccggacgtcatcggggtccaggatttaagctcgtcagaaatggtgatcagaatcattgccaaaactgaaaatatggagcaatggcgggttgaacgcgtactgcggagagaaataaaaatcgcgctcgaccgttttaaaaacgccgcatccgccgaatagaaaaaccgaagcgtaagcttcggttttttcttttttaatgaaattttttttccacttcgctgcagatttcgtcggcggtcattccggaagccgtaatgacgggagcctgagttgacgtatcggcaattccttggacattgctgtcaagtccggttacgacacagcagtcacaattcttcgcatcctcaggagtcttcatcatcactacgtcatatcctttttgttttaacgcctgttctacatccgataaagattgttcaattccaatttttttcgtcatattgaacacctccgttatgtagaatgctcaatttttgttagattattcttcttttcggatttaattggcatacttcgaaaaatatccgaccatgacattgaccgcggtttccatcgcttcttcatccgggttcagctttgcgtgatgaagcccgtgggatgaatcggcccccagccagaacataaagccgggatattttttcagcatatatccgaaatcttctccggtcatcgcttctttcgccgttcttacgtcagcaagctgatgatcgctgacaaattgcataaattcttcggtcaggccgctcgtattataaacttgatgataaacggacggatatgtaacttttcctttgcatcggaagccgatttcaattcctttgacaagctcttcaatccgctttttcaccatacgcattgattcctcggaaagcgtccggatggttccctccagatgagcatgctctgcgatgatattttgcgccgtgcccccggtaatcgttccgacagtgatcacagcgctgtcaagcggatccgtatttctggatatgaccgtctgcagctgcgtgacaagcgtgctcgcggcaacgaccatgtcgtctgctgtatgcggatatgccgcatgcccgcctttcccctcgagatcgatgacgagttcgctcgtattggcaaacagcaatccgcttttggtggagattgtgcctacaggaagctcaggtgctatatggagagcagtaatcaaatccggcgtccattttttcagcacatcgctttcaagcatcggttccgctccgcccggtccttcttcagccggctggaataaaaagagcagatcatgtttgacgggatgatggacaaaatgatcaataatgccgagcgcgatggtcatgtgcatatcgtggccgcatgcgtgcataaaaccggggtgttcagatgcaaacggaagccccgtctgctcttcaatcgacagagcgtctatatccgctctgtaggcgagcattttttccggagccgtgccgttgactttgacaaagatgccggttctccaagtttcgatttcaattctgtcctccggatattggttcaatagattcagcaggtactgttgggttttatattcctgaaagccgatctccggaatgcggtgcagatctcttcggatggcaatgagccgctctttttccatatgtattcctccttgagataagaataaggcgtggattttatcatccacgcccattctatcaaaccattccttacagctggcgtaattcctgtttgatttctgttttgccttttgttttttcatcgatatctttgatttttttcgcaggtgttcccgctacaacggtatatggctcgacgtcatttacaacgatggctccggcagcgacaaccgcgcctttaccgattgttacgccttcaagcacaaccgcatttgcgccgatcacaacgtcgtcttccacgacaacaggcttagcgctaggcggctcaataacgcccgctaatacagaacccgctccgatgtggcagtttttgccgacagtcgcgcgtccaccgagcacaacgttcatatcaatcatcgtaccttcgccgatgactgaaccgatattaatagatgcacccatcatgataacggcattgtcgccgatttcgacttggtcgcggataatagcgccgggctcgattctcgctttaacatcttttaaatcaagcatcgggatcgcagagttgcggcggtcattctcaatgacgtaatcctcaattttgtctttgttttcttcgattgcgcttttaatttcagcccactcgccaaaaacgacgccggattggccgttcaggaatgttttagcggaatcgccaaagctgattccttcgagatcgccttttacatacacttttacaggcgttgattttgtactattttgaataaatgaaataatttcatttgcatccatcattttcatatgtattgtcctcctctgattttctacctcattactgtaacaaaggaaggatacaaagacaagaaaaaaaggaacaagcctttattctgccggctggctgcacagcgcggcaaactgtcttccgaattcccggagctcttcttcctcaccgccctcagggttgttttcaattttgaccgacggcagcaccacccgcccgccgcgggccgtgattactttttccaattcgtcaaccgctccgcaaaaaaactcataggacgtatctccggaaccgaacaaagcaaatgtttttcccgtaaactccaggttttccatatcttcagcaatatcgagcatttcatcaggaagatccccgtctccccacgtatatgtgcctaataaaatatactcgtaatcattaaaaagttcggcatgaatatccatcgcttcatatctgtctacggatgcttgtgcttcgatcagccctttttcaattaaatccgccatcgcctcggtgtttcctgacattgtagcgtaaacaagcaatacattccccatcttcgtctctcctttatgcataaaaactaatgtgcgagccgtaccgcctcatacggtctgacaaacttactttcgtaaaggcccgcgcaaaaaaagttttcttcccggttggccacccgccatccgtgaccgcggatcgtatcaaaccactttaattcaccggcggcgagatcagcttgataaatacgcgaaaatccgttttcgtcctgtgacgatgtgacataaataaccccgttatcctcagaaacgtcgagaaatgatttttcccgtacggcgggcccggctgtaatggcaaactcctcttgcgtccgcacgtttcggacggcaacctcgccccgttctccttttgccgcgccctttgctgcaatgagccattcattctgatacatcatcattgaagccgtcatgcgctgcctttcgcggcttatacgccggatgcggtcttccgtcagttcatacgcccaaatgccgccatgattcatatgaatccgggtgccgatataaatcgtctgaccgtgtaaacaaagcgaacggatgacaggcggctcctttaattgtgaaaagggcttagccacatgccaagtgacgccgaaatcatcagataagtagaggcagtatgcgccatgcgcacagacaaacccgtcattccgcccggcaacggcccatacggaggcgctggtcggaaatcgggaggccgtccaagtctttccctgatcggctgatctgaggacggcgcctttttctccagcggcgaatatgtaaggccctatataagtcagcacatgaaccctgcttttcactcggaatagtcttttccagccttcttccgcggaaaaatgaaaaataccttcgtctttcactgcgacaaaatatcctgaagtcactgatgccatgacagccgtcgcgcctttatgaaacatggcaccggtctccgtggtgagcggcccatgcaagaaaaccgcggacaaattctttgcagcattcttgatcttcagccgtctcgggcgccagctcgattttcagcgtttccggatataaattggctccggcctgttcaaacgcatcgcaaaacagcgtgaccgcttcgcaaaacttcgggtaggcgtgatcgcctgaaccgaaacaggccgttttcagtccgttgagctggctgtgcagaatatcttcgtaaaaatcttccgcttcgtaaggaagatcaccgtccccccatgtgtacgtgccgacaaaaacataatcatatgcttcgagagaatccgcacctgcttcgtccatgtcgagacagtcaactgctatctgatgcccgctcagtgtttcttttataatgccggcaatatcctctgtattccccgacatgcttgcatatatcattaatgctttctgcatatgatcacctcgtaattgataatgattttcattaacatatataacactttaaatgataatgattttcattgtcaataaaaaataaaaaaagacagcatgattgctgtctttctaaaatgggcgttcctgcttcagcatatctttaataacagaaacaaaagcctgcacctgttttaattcaaatgccggctcatatccgagcagccatgtgtcacggccgatcggatggtcctttgtatcaagcaggggcattttatttactttatcttcctcttctaaggtgactgacggcagaatggcataaccaatcccgtgcagcgccatctgcttgcacgtttcaatctgatcgacgaggatggtctgtttcggcgaggttttgaatttttgatgccaccaatgctgaatttcctgaaaatatgtactgtcacttttgaattggataaacggccgatcggtatgggctatatcatcaatacaggaaatttccgtatcaaccaaatataaatgatcggtcattaaataatctttccggcctttccattccggatttccccggataatgccgatatgtacctgatcttcatacagacttttcagcatttcgctgctccaccctgtaatgagagagacctttgcattcggataacgctccacatatgtttttaacactttcggaagccagtgctgcccgataatggaggcgacggcaagctttaatgtgccgtgaatctcaccctcaagttcatcaatgttttctctgattctttcttgccgatccgtgacgtcatttgcaaattgtatgattttttctcctgccggcgttaccgtaagtcctttttgagatcttagaaagatctttgttccccaggctttttcaatggtctgcaatcgctgggacagagccggctgtgacacgaataaccgttcggcagccttcctcatgtttaattcctcagctaaaactacgagcatatgaagctcttgaagctgcatgtcgtcctccttttcaatgccttttcgtatttcttatctaccattctaataaaataaaggctgccgaggcaagcgccactcatatgtatgcgttttctttttccggcataaaaaagaacaaataggctgatcgtgcgagcctacttattcaatgatctgatatggctgctcaactgttttaacacgactcttctcgtgaaaatgccttcaaagacgccttcatcattttcaacgcagacaaagccgttattaatgaccatgctgaaccctttgataatcggatcattgatgtggagacggggaatgtctttcagcatgacttcctcaaccgtaatttgatccagcttctcaaactcgatccgttcaagtccgaaaatgctgttcataatcatatttgtcccgatcaaaccgtgcagacggtacgaagcgtcgaggacgggaatggcggtatagccggtttttgtcagcactaatagagcatgctcaaggttgtttccgacttgaacgtgcgccactttatccgcctcgatcataaattgtccgactgttgcatcaagaagctgatctgattgtaagctaatcatgtcacttcgacccctttacatttttcatcaaagcatgtattccctatattgcaataatataaacattatcattttttgtcgaaaagtttccgtcaataaaaaagatactctttgcaatcgagtatcaatttataggccgctgattaattttcattccgaaaacgatcatagagcgttacgagttttttataagtggttccatcaacgctttttgaccctgcttctatatcgttgatttcgctggtcaaaagctcaatggcatattcttgattgatcaggatattcagcagaagtttctgttcttcttccgtaaatcgttcactgataagactcatacgtaatcaggccccctatttttaactgaatacctctgaaagcaatgtgaaatttgctttcagctctaccgctagaataagtaaacagaaaaaaatcgtcaaccgcataattcgacattttgcggattctgtatgaaatattattttgtgtaacgattggcataactgaatgctgtgcaggaatcgggcttgattttcgcttcaatgcccatcgaggtaatgcggccggtcatttcttgtatcaattcttttgtcagccctttttgaccgatatccagatgcacttcaaatgaaagatccgccccttcatccgtaaaaggcaagagcaaatctgtcagttccataagacggccgtcgaggatatgcgcagccatctcctggctgaacgcggtttccagcgaaattttttcgcgaaggctatgtatcggtcttgcaagatcatgatttttcaaacagccccaagctcccttgcctgtacggtgcaagtgtatagccgtaataaactttgtgaagtcgcggtaaacttgtgaatcagtccctacagacagcacgtatgctgaacgggggtctttattgacaaagcgtttcagccgctccgtcacgtcttgaaaggtcatctgtgcctcagaaagattataaaacagaaaagaatcagccatgtacggacactcctctttccagagtctacaaccaaacgaacaagcacgttcctttgcataatttaataaagctccgcttgcggaagaccggaagcttggtcagcctgaaaaatcaaatcaaattactgaaggagctcaaaaatttcaatagaaatcatgtcaatgttatcaaacggatatgtgttaggtttttcacctttttggaaaaccgtcagttcaaacgtttgatttttttcgaaatatttaacactgcaaattttttcgccgttaacttcaaaataacgctgcatcggctcgttagccgcttccgctgtttcttgcagactttgcagccgcgtgatgatacccattaattgtgacattctaaaaaaagactcctttcaaaaaacaacttcaaatcaacaagtatttattataatacaagttctacagagcatcataccataaagtagaccgggatggcattttcccgctggattttcaaaaagaaataaacgggaaaaccgtgttttcgaatagtttgaagcttttttcggaatgtcatacacctttcaaaaataatttttcgctttttgagccgccattgtcagatatatgtgagaagaagcctttttatgcgcagacggcataaaaaaacttggcgggggtagcgccaagttttttcggatcttgatctgatagaggggttggggaacagagagtaacttctctctataaccaaatgataatgattatcagtatcattgtcaaacgttttttaaaacttttttcaaatgaacaaaaaaagcggcatacagcagccgctttaaagtaatccgtcctgttcatataaataagagtaaggcagatcgataaataaatacatattgtcatccatcgggtatgaaaaggttctgatcatctcacctgtctcaatatcactgtacaggtcactgaaaaagccttttcttgaattccgcatcttcatgatattttctaaaaagtacggacgccagctccagtttttctccatgtattcaggctgataaagccattcgccggactgcttgaacacatttcccgtcagctgatagccttcttcatcacacatataaattctgaagcagcagtcggtcaggttttccgccagttttttaataaactcatcgtccgcctgatgggttttcttcagctcggaaactgcctgattgacccgcttataaaaattctcagagtgttcatagaccgtttccagcttctttttttctctcgtgataaattgctgaaactccgtcttcaagcgtgcttttaacaggctccggtctataaaatcgccgctcggcgcctgcagataatagccttgaaaaaatcggcctccgtttctccatgcgtactggagctggaaatcagcttctatatcttcatacagcagcgcggcgccgatttttctcgccagcaatgaaatgctgtacagcacatgctcatatgatggtgacggctgagataccttcagcgcctgcaaatctattttcagaaggtccggtgaaaggagcgcgattctgtccaggttgctgctctccttacctatattgtccaccgcgattttaatgccgtatgtacgatagtaggcaagcatatggtacagctgttcaatgtcgccttcgaaattgtgctcggtgatctcaagcacaatacggttcaattcaatgccctgctcttcgtattctttcaaaagctcaagaaagctttcgccgtggtcaagcatcaatacattcgcatcctgattgataaaaatcaacagatcacgatcagcttctttaaaccgctccagcgcctgcctgatgactctgtcatcgacctcaagcttatattcttccggaatgccggaatctaagaaaaacggcccgaggctctcaatctccgcatctgccaaaatccggccaagcacttcgtagcctacgactctttgttcctcagcgttaaaaatcgcttggtaatacggaatgacatcatcaatattcgtcagtatatcaagtgggtccaacatgttatcacctgcttctctatctttgtctgattatacacaattatatcagcaccacaaatgtttagattaggggaaaaggaggcagtatggcggcagcttaaaataaaaggggaaaactttttaagatactcttccggttaattaaggacgttattcatttgtttcacaatcacaaataaaaggataaatataagagcattataaccggcagctgtccaaaaataatggctccaatcagttctgttatatatccaatcatcctcatgttccaactgaaagaaagttccttttttatctaaagtgccaaatgtaagagttgttaacccgccaacactctcggaaacgtcaactccatacattgaaccggcatgatcagtatgatttattggcatatacgtataatcagataaaattgtttccgccagcttagttggcagagacacatataatacagccgatgtatcgcctccgagcccactcaaatactccctggctttaataaatttcgtttcatcaggaaaatctatgtgatatagcttttcaaatctgattatttcatcagatgtaagattggtattttgataatactccggagtaaaagcgcaaatgataaagtaccaaatattaaagatgataacgaaactgcttacaaatagtacaacgaaccattttaataatttcttcaattaaccgccccttaatctttcaaaattatatcataattttgaatagaaaataaaacaagcgaacggcggctttaacgttcgcttgttttgcaaaataatcaatatatgaaaaattaaaacggataaggattcagccattgccccccgtccattgtgatacagtccccgtttatgtaggacgcttcatcagatagcaaaaacgctgccaacgcggcgatttcttccggtgtgcccagccggccgagcggcacactgttcatagtgcgggacaccgctttttccgattcaaacagcttctccgcaccgcctgtccgttcaatcgggccgggggctatcgcgtttgtgcggatgccgtatttgctcccccattcaacggccagcgttcttgtcagtgacaatacccccgctttggctgcagcggaatgaacgacacccgctcccgctccccatgcgtatgtagcggccatatttaagatgacgcccttctgctcctgctcgatccaatgccttgccgcggcttggctgcagaaaaatgtgccgtttaaaacaatctcaataacagctttccatccattgggcgtcagcttctctgccgggcaaataaagttgccggccgcattgttaatcagcgcatcaagccggccaaagacttttttcgcttctgtaatcatgtctgaagcggcggaatcagaacggacatccatttgaaaacaggcgacctgcccctcaaaggtctcaatttctttttttgtttcctcaagtgcttcatggttcctccctgtcaccatgacgtgccatcctaattcagcctgttttttcgccattgcttttcccatgccgcttgaaccgcctgtaatgattaccgctttcttatccataacaaacccacctcttttattgaatgaataatcattcataattttatcacagatgtctttccgcgtcattacatgctgagaagggatttttcagcccggctgatgatataatagaacaactctgacaaaggttggttttacatatggagaaaatgaccagaagaacatttttaaaaagaggattcggcattttgggtgcagctctcgcaatggcttgcggaggttacggctatgcccggtatattgaaccgcgcatgattgaggtcacccggcatacaatcaccaaccgcctgatcccccgcggctttgacaattttaaaatcgttcaattcagcgatacgcatcttagtgatgtgtttacatccggtgacttgaataaagcagcggaaaagatcaatcagctgaaacccgatctgctcatctttacgggagatttaattgataagccgcatttatttaatgatcaccagcgtgcactcgccgtgctgaaaaatcttgaagctcccttcggcaaactttgtgtttacggaaaccatgaccacggcggctacggtacgaacacgtacaaggctctgatggaagcggctgattttcaagtgtttcgaaacggctatcgtcaggtgcagctgacagacggaagccggattgaactcgcgtttttggatgatgtaatgctcggaaaacccgattatgaagccaccctgtcccgcctttccgaagatgcgttttccattttaatcgtccacgagcctgatgccgctctcaagataggcggatatcccgtaaacctccagctgtcgggacatactcacggcggccaggtccagctcccgtttttcggccctctcattacgcctccttacggaaaaacgtataccgacggcatgtatacgctgcatgacacagccgtttacgtcaatcgcgggctcggtacgacaagactgccgtatcgatttttatccagaccggaaatcacgctgttcacattgaaaaccgagcaaaaataagacttttatcctgatgcacagacaccccctccgtaatatgtatatggaaaagagcaaaaaggagggtgatgaaactgctgacatatcaagtgaaacaaggagaaaccatctcaagcattgcgcaagacttcagaataagcactgctgctctccttcaggcaaatccctcaatccaatcggtcatatacgcgggacagcacattatcataccgaatcttcccgatccatccaccattccctactccatcatcgtgtatatcggagcgaagaaactggagttataccgccttggcaggctcatccgtacgtaccccatcgcagtcggaaaaatattgacgaccacgccgaccggagaattttacatcgtgaaccgccagcctaagcccggcggcccgttcggcgcttattggctcagcctctctaaaattcattacggcattcacggaacaaataatccttcctccatcggcaaagcggtatcaaaaggatgcatccggatgtataatcaggacgtcactgaacttgccgctaccgttcctaatggaacaagggtgactattataagatagaaagatcttatttgttaatggaacgagctgatgataatatattacagtgggacctttagggtaaggagcgtgtttatggatatatttaaaaatcgcaattttgtccgtctctttttcgcagcactcgcttctcaaatgggaacgactgtaggtaatatggctttcgctttttacttgctggaccatttttcaaaccagccggcatacacgactttggctgagctgatgtattcactgccgacagttttcgtatttctgattgtcggtgtcgcagctgaccggcttgacagaaaaaaagtcgcagagaattgtgactggatcagagccggactgacgatcgtattgtttgccgcattatacaccgggagcatccctctcgtgttctgtattttgttcatcagaagcgccgtgaccaagttctttttcccggcggaagccagccttgtacaagctattctgcctaaggagcattacgcgaaagcggcgggacttaaccagatcctgttcagcatcttcatggtattcggcgtcggtataggcgcgtttatgtataaaacgatcggtattcacggagccattatccttgattttgtcagctttattgtatcaggctttctgatccgcgcctgccgcattccgaaagaagcccgtcagccgaatggcccttttaaatggggagattcgtttctgaaagactcggccgctgattttaaggaagggatcgtatatattgttaaaaacaaattgcttgcttcccttattttcggcttttttatctttggttttgtcaacggcggctttgccgtactgccgatgtttacgatgaaatacggacttgcgcctgatcattacgaatcacatacttccatcttcaccgtcgcactcggcttcggcctgcttgcaggaagtgtaatcggaacgatgatcgcaaaaaaagtcaaaccgcatcatttgatgtcgattcctattttggcagccggactgctcatttttgtcctcggctatacggataagctgtggatttattatgcggcggctttcgtcctcggcatgtgcatcggccctgtcaatatcgccatcggcggatggatgccgaaaatcgttcatccgaaaataatgggccgggtcagcggctggcaggatccttttatgatgtttgcccaatcgattacactcggactggtcgccctgttatttccgaaattcgttaccaatattgattacctttattacggcatgggaatcgtgattttagcggtatttgtgttctattttatcgctcttccgaaatacagcgccgaggcagcagaggtcgatgtgcagcaatcattaaaggctgattccgaaaaacatgcgaatcctgtctaataaaggaaaaagacgcgcccttttcatcagaaaaaggcgtatttttataatcaatatttgcatttcaacgctaaaaaagtataatctatatatgaacttgatcaatgcaaaggagagaaataatggacgaccacgcttattcgaaagagctgcagccaaccatcgagaatctttcaaaagctgtttatactgtgaaccgccatgcaaaaaccgcccccaaccctaaatacctttatctgctgaaaaaacgggcattacaaaagcttgtgaaagaaggcaaagggaaaaaaatagggcttcacttttcaaacaatcccaggtttagccaacagcagtcagacgtacttatctctatcggagactactattttcacatgcctccaacaaaagaagacttccagcatcttccgcatttaggtacgttaaatcaatcgtaccgcaatcctaaagcacaaatgtctttgacaaaagcgaaaaacgtattgcaaaaatatgtgggcttaaaggaaaaaccgcttgccgccaacaggcagcagcccgcttatcataaacccgtatttaaaaaacttggtgagagttatttttaattccgccgcaaaaaaagccgatgcgtcatgcatcggcttttttctattcaatcacgtacgtatccacttttttaatgagctcgctgatttcaggcttgctgatctgttcatccgctccgactacttcgccccggtggcgcaggtcgtccgtaatcagggacgagaaaatcataatcggcacatcagagctttgcgggttatccttaaggagcttcgtcaaacgatgcccgtccattttcggcatctcaatgtcactgataatcatgtcaatatggtctgacaggttttctccgttatccgtcagttccacgacgtaatcatacgcttcttttccgttttcaaacgtaacgatttcactgtaccccgcctcagtcagctcatccgtcaaaagacgcatcagaagcggcgaatcttcaacgatgatcagttttttacccgcccgtctttcatcaaatccttcctgatggacatgataagtctcaactcccgatgccgattcaatatcgtaaatgatcttttcataatcgggcagaaagatcatcgtgtcttccagtttgatgattcccgttaaatgccgctccatgccctggttcagggaagtcggcttttcaatcgcctcccaggacaccctgtggatttgtgaaacggaaccgacgtgaaagacgattttccgtttgttgaattccgttacgatatatttatcgtcttttgctccttcggcatcaacgccgaaaaaggaatacagactgatgacgggaagaatttcgcctctcagcttaatcatcccttctacgtctttatgagactgaggcacagatgtgacctctaccggctgaatgatttcccggactttcatcacatttatgccaaatgtattgacgcctacttcaaatttgacgatttctaattcgtttgtgcctgaatccaataaaatatcgtattgttgtaaagacaattcaatccctcgctatccgcattcagtattgtactgtatatatcggctggaaacggaaaaagtgaatgtattcggtccaactggccatgaactctttataaaaaaatgcttttttctgatatcccattgactttttgacatcgagtggtaaaatagtcaaggatttttcaggaagaagggtgtaataaatgggtacagtagtcatattcgaccaagatcaaatgacggtgttagaagatatcagcaaaacggcttacctgcaaatgaaaaaagaggcgaaagagcgtcccgacaagcccgctccatacatcttatggcgggaagacgtcagctttgaatacgggtattaatgacattcgccacatatcacaatagatagatcatgatacaatgaagacaatcatttcagctggttgtcttatttttttctgaaagaaggtatgttttcacatatcggacatatactcgggatagttcaataaaaagatgacaaatgctcagctagtggtaaaataggataaactcaatatatagtataaggtgatgaattatggaacatttgcttaatccgaatgtaaaagaaattgaaatttcaggaattcgcaaattctcaaatcttgtagctcagcacgacaatgtcatttcgcttacgatcggtcagccggatttcttcacgccgcaccatgtcaaagcggctgccaaaaaggcaatcgacgagaacgcaacggcatatactccgaatgcgggcggccttgagctgagacaggccgtacagctttatatgaagaaaaaagctgatttgaattatgaagctgaaactgaaatcatcgtcacaaccggggcaagccaagcgattgacgcgtctttgcggacgattttatctccgggcgatgaagttattctccccggaccgatatatccgggttacgaaccgatcatccgcatgtcgggcgccgttccggtccatgtggatacgacgacacacggatttaagctgacggcgcggctcattgaagaatcgctgacaccaaaaacaaaatgcgtcattcttccttatccgtcaaatccgaccggagtgacattgtctgaggaagagctgcaaaacatcgcagccgtcctgaagggcagaaatgtttttgtcctgtctgatgagatttacagcgaattaacctatgacagaccgcattattcgatcgcgtcttatttgagagatcagacgatcgtcatcaacggcctgtcaaaatcacacagcatgacgggctggagaatcggtttcattttcgcaccgaaagaaattgccaagcacatcttaaaagttcaccaatacagtgtgacatgcgcgtcttcaatctctcagaaagcggctcttgaagcggtgacaaacggtgttgatgatgcgcttattatgagagaacagtataaaaagcggcttgactatgtatatgaccgtcttgtttcaatggggcttgacgtcgtaaagccgtcaggcgcattttatatcttcccttccattaagtcattcggaatgtcatcgtttgattttagtatggctcttttagaggatgcaggtgtggctcttgtgcccggcagctcgttttcaaagttgggtgaagggtatgtgaggctgtcattcgcatattcactggatacattgagagaaggcttggaccggctggaagcatttattttaaaaacgagagaatccatgcagactatttaaacaacggcataacgccgttgttttttattgtttcgggaatgtaatatgaaaggccgtgcctctatccggtttgctgtctacttggatggctccctgatggtttttaataaggttgaatgtgaccatcagccccaggccggttcctttttctttcgttgtcaaaaacggttcgcctattcgtttcagcacgttttccggtatcccgtcaccctcgtctttcaccgtcacattaacagaatactcatcttctgtcataagaatgtgaaccgttcccccatccggcatcgactcaacggcatttttaatcagattgataaacacctgtttcagctgattttgatcaccgttaatatacatgctgtcatgttcataatccgttttgataaaaatccctttaagatttgcctgcgtctctaaaagagcggtcacttcacttataattttctttaagtttacacgctctttcacggcgttttgctgaggtttggcaagcattaaaagctcacttaaaattaattcgattctgctcagttcagaaaacacaatttcaaagtaatgttcgttttcccccatcgtcggcttcatgagctgtaaaaatcctttgatcgccgtcagcggattgcggatttcgtgagcgattcccgccgccagctgccctgcgatagacagcttctccgacttcagcattaattcctccgtctgcttccgctcagaaatatcacgcagaatgacctgcacggccgtttctccgaaaaacgtcgtcggaatgcagaccatttccgtgtagatcagccggtttttaaaggtaaaccacgattgcttaataatttctgactcggtctttcggttgatgatattttggatccgctgtttcacgccgtcatgatcacagggatgaagctgatcatagacgtttttcccaattaaatcttcatatgtttcagcctcaaacagcgaaatgcccgactcattcatgaatacccatttatcattgtgaatcacggcgatcgtatcaattgaattctgaatgaggagctgataacgctctctgcttttttgcagaatcgtttggaattttttccgtgaagaaatatcaatcagtagcagcaattccgcccgctgatttttatatgtcgtcggtgccgcctttacttctaaatgaacgggtgtgccgtcgagccttctccacgtctgttcgatcattccgacttccattcctttttgcatccgcacaattcggtttttcacaatgtcgtgatactcttcttcaataaactcataagagcgcctgccgattacctcgtctttgctttcggctcccagcatggcaagcatcgcgttgttggcgtaggcgattgtgccgttgatgctgacatataaaggattcggcagcatttcgacaagacgctcgaattcgccgtttccagccgcatcttccgactgtggttctgccttttgtttcttttgttcatacatataaggccggcggggcgtcttctcctcaagcaccttgattttgaggatgatttcccgatccgtcccctccatttgcggtgtgacaatttccacacccgcttcaagccatacgatggtatgatcttttttaataagacgaaaggtgcaaggcatcaaatgatgctcattatagaagtaactttcaaccaaaaattgatcttcttcatgcaggaacgttttgagaaatgacccgatcatctcttcctgagaataactgaaatacgatttgcaatttgcagaaatatacataatacgcccgttagacgtcaaaacggcatgaagatcggttttcgattgaaactgtttgacatgctgagtatcctgttccacagaatccctcctttgcattatactcgcactgcaggctggacacggactgatataaaaagaaattccactagattgattcgctaaaaaataagcattctccttctattcttattgcgaacgtcaattttcctgaatgaaagaaagggcgcacgatatgttcggccgccctttcatttgttattttttattgtatttcttttcaagctctttgtaagcgtcaactgctcccttggcaatgtttttgcttacatgatctttatcatttcgaacagacggaacgacgacgctgaatgccactcttggatgttctgacggataatagccgacaaaggtcaggttatacgtgtacttcccccaccagtttttgttcgtgccgtaatagtgcgtctccgcggttcccgtttttccggaaacatcagcgccggaaccttggaatgttgaataagccgttccttgaggtgagcttgtgaccaatttcattcctttatgaacttggtcaaaatcgctcggactgttatttactttgttcaaaattttaatatctcgctgttcaatcgcttttccaatcttatttttgctgtccggttcatgaatgcttgtgacgatccgcggctggacgcgatacccgccatttgcgatggctgaaatatattgagccatttgaagcggcgtatatgtatcaaattgtccgatcgcaaagtcaagcagcaatcccccgaccatttgcggatttgactgcatgcccgctgattcctggggaagatcaatcccggtcttcacacccaaaccgaattgggcgtagtagttgcgcatttttttaatatcgtctaatccggcaggcagcgtgccgtacggcctgtaggtaatgccggcgatatgcatggccacatgaaacatatatacgtttgaacttctttgcagcgcggtcagctcagtaatagctcccatttgtgtccacgattgttttttcgtgtcgcctttaaatacaagcggtgcatcgacaaacgttttataatgcgggaggccgctttggtaacctgcgagaacagtcgctcctttaacagaagagcccatctcatattgggtcgtaaatgctccgatcgcaaaatcctgtgttttatttgtttcgagatcgatgcgtttccccgccattgagagaatatccccgttgttcgggtccatcatgacggcaaatcctctgtcaaccatatagttgcctgcggcgcggcttctcctcagctctttttcaatgactttttcgactttcgactgtaattccatatcgagcgagagctgcagatcgtagcctctgctgccttcatcgatgggcttttggctgacgacctcacctttgctgttttccacatactctactttttctttatgcgcgtttaaatagtcttcatactgatattcaatgtagcttttacccacccggtcattcagtgagtagcctcttgtgacataataatctttccgttcgcccaacaatccctgttccggtgtcgtcacaccgccgaacagagagtacagcgttttgtcgtatggatatttccgcgtccagtcattgatcacgtcaatgccggggagctctttcagatgctcggatacgacggaaacttcttcatatgtcaggtcgctttttggtttttgcttgttgttttcatgctcgtcaagcagtgaaccgctgtttccgtttccgttcagcttattcgggtccattgatttgacgacttgcggctgataggcgttgccgcttgaaaaacgcgtataaatcgccgcgatttccagctcttttttattttgtttgatcgcatcaatctcctgcttcgggacgcgttcaatctggcgtttgtatacttcttgcggtttcaggctgttttctgaatccttcataagcttttccgccttcttcggatgtgcggcaagccagtaatcaatgatatttcgatccttcataaattcagtatcaatatgaatcagtgcggcgagattttttgccgttttcaatttgtcctttgccgaggtttttgaggtggatacatatacaatttcaggcacagcctggttatcaaccgccaccctattccgcttgtcatacatttttccccgcggtgtcggataataggcggtttttgcatttgccttctccgcatcctggcggtgtttatccccttcgacaatctggacgatgccgagtttaaaaatcagtgccgtaaagagaagaaaaacaatcaaaaaatagagattcattctcagcgctctgtaacgtttcgtttttttctttggttcgcgcgcaacttcagccactttctgttacacctctcaaatcattgaatatatttacataaacagattttaattgtaacatttttgtaaaagttgttacagcgaaaacgggtaaaaaaaactgtcaagatcaaattatcttaaaatatatctaacacttcaaataatttgaagagatgtaacggattttaaaaaataaatacagatcgtttttcccggtatagagccatttttctgcgctcaattacaattatgacaagagtttgttgtcaaaggaaatggctgcctgcattatgacaaaaaagctgtgataagatttttcatgtagaaaaaaacttctctgggaggctattaactatgaaaaaagcatttctcttatctgccgccgcggcagtcagtttgattacattcggaggcattcagcaggcatctgcaaaagagctgtcatgccagcacgtcgttaccgtgaaaaaaggaaacactgtacagcatctgactcttcaagaggctgttgaaaaactacatatgaaaacgagcgtgaaaaagctgaacgttaaaaatgagaaagaactgactcagctgctgcaaaaacacgcaaagcattctgacatgacagttaaagatgtacaaaaagaaacaccggcaaaaacggctccggctgctgccgaaaaaccgaaagccgatcaaaaccagacggctgacaatgcaaagcagacagataacacaaacaacagcagcgagaaaactccttcatcagtcagtgcgtacgaaaagaaagtcgttgaattgacaaacgcagagagacaaaagcaaggcttaaaacctctgcagattgatgaaaaattaagcaaatccgctcacgcaaaatcacaagatatgaaagacaaaaactattttgatcaccaaagtcctacttacggctcacctttcgacatgatgaagtctttcggaatcacttataaaactgccggtgaaaatatcgccaaaggacagccgactcctgaagctgtcgttaaagcttggatgaacagtgaaggccacagaaagaacatcatgaatcctgagttcactcaaatcggtgtcggttatgtagaatcaggaaacatctggacacagcaattcatcggaaaataaataataaaaaagattgcccctgcgggcaatcttttttatttcacccaaagcttataaatgctttgagtcccgctgttttcttcaccttgcgcggaaagcttgtcgtataatgatttggcgagcgccaatccgggcatctcttctcccatgagctccgcttcttcaagggcaatgcccatgtctttaataaagtgtttcacgtagaatcccggcgcaaaatcgcctttcagcatacggggagcgaggttggtcaatgaccagcttccggcagctccggttgtaatgcttttcagtacttgttccgggttcagaccggatttttcagcgtaagccatcgcttcagccactccgaccattcccgctgcaatcgcgatctgattgcacattttcgtatgctggccgctgccagccggcccttgatactgaatgttttcccccataacggagaaaagcggcaggcatgcttcaaacgcttctttttctcctccggccataatggcaagcgttccgttcctcgcgccgatgtctccgccggaaacgggtgcatccaaggcgtgaatggacttttctttggctttctccgctatcttcttcgccagagacggttttgatgtcgtcatgtcgatgacaaacgccccttcttttgcgtgccggagaatgccgttttcgccgaaatagatttcctcgacatcactcgggtagccgaccatggtaataataatatcagctttctctgaaaggtctttgaccgtcccctgccagaccgctcccttattcagaatctcttccgctttttgtttcgtccgcgtgtagactaaaacaggatagcccgcttctaaaatgtgcgatgccatactgtttcccatgacacctaaaccgataaatccgaccgttttgttcactgcgctttcctcccctgctgcgattcatatatacgatttcatgtctatattaccatatgacaggctgatagagaccgcgttacaaggtgaatttagaaatggcgctgatcagatcttcgcttgcgctctttaacatatcagtcgattgcttcactttttcaagcgtaacgagctgttcatcagtagaagcattcacttcttccgccgctgccgcagattcttgagaaatggcggagatgctttgaatcgcttcttgaatcgcggcttgttcttcactcattttttgaatgtcattgtaaatatgatctataccttgaacgagagactgcatttccgtcgtaatcagattgagaacctcacccgtttcatgaatggcgctgttttgttcatcattcattctgcttgcctcaatcatcgcgtgtgacgcttcttttgtctcagattgaatcagccggaccgtttcactgatatggccggaagaaagagctgattgctcagcaagcttgcggacttcttcagcgacgacggcaaagccccggccgctttctcccgctcttgcggcttcaatgctcgcattcagcgccaagaggttcgtctggtctgaaatggcggatattgccgtcacgacttcttctatgtttttcgtttgttcttccaggtcattcagcattgcctctacttttttcgtttctgaattggcttcgtttgacttcatcagcagctgcccgagcgcgtccagtcctttgtagctggcatcctctgaagattttgagagttgttttatgctgcccgcgcgatctgcgattccttttattttgaccgagagattttctgatttttcgttgattgtctcaacctctgacgcttgctctgtcgctccggcggcgacttcctctatcgcttttgcgatttgtccgctcgtttcatttgtttcttgtgaaatgacggttaattggtcagatgtatcggacacattttccgaagaggtcttgacctgttcgaccatctctttcatattttcaaccatttggttaaagtcttttgttaactcgcctacttcatcttttgatttcgtctgggcgcggacggttaaatctcccgctgagactgaatttgttttggcgatcagctgctgaatcggcccggttatcgtttttgcgaggaaataactgagtccgatcgtaatcacaagggcgatcagtgacataaaaatgctcaccgtgttcattttgtcggctactcccatcagctgatctttttcaaactgcgttccgactttccaccctgtttcttttaccgtttggtagacgaccatgttcccctgcagctctttgacaccttctttatccgcagtgatgtcttttaacgtctgatcttccgaaatatttttcccctgtttttccggatgcgccagaagagagccattttcatccgctaaaaaggcaaatcctttatacgggaccttttgctcgttgaccatgctctgaatggaggacagcttcagatctaagctcgccactccgacgacggttccgctgttttgaatggcttttgacgccgtcacgattatgtctcccgtcactgcatctttataagggtcagtccagacaaccttatcgggtttttcagccgccatcttataccacgttctatttgtcggatcatagtctttggcaaaatcggcctttggatatgtaaacatttgtttgtttgcggttccgacgtacgcaagcgcgacatatttgtcattctgtccgatctgctttaactcatcgttaaaaagccgcgcggtttctttcttcccatctgatagaaaagaccgggacaattcaccgtctgctaatctcattaatacggtctcatcatttttcagctgaagctcaatgttctgaccgagtgaattggtgacattctctgtcgtacgttttgcttcctccgtcatcatcggctttaatgtcaaatatgaagaaaccgttaaaaaaacaaccgttacgataagcattgccgagacaaacacagcaattttgatatgcatttttttaaacataaccatcccctcctgagagttatatcggtctttcggccaagaaaatgaataaatcttgaaataaatatcaaacatttccgtcatttggcgcagcaaaaaaaagagccgtcatgccgacagctccgccttacgtaaaatattcgattttcgctttcggaaaataggtttcgatataagattcgagagtttcccttaagtcatgttcttcgtctttttggtatatatacttgccgattccgtagcgtccccatttgtatctgcgcttctcttcatcaagctcaagctttgttttcggatagttcttctcaatcacccgtttggccggttttgtaaaacggtgctggatcagttcaaatgtgatgtcatgccgaacgtcttcatcaagcgccgcgtcaagtttctcaaacagttccttatagccttcctcccagccatcgtgaatataaatcggcgccacgatgaaaccgagcggatagcccgctttagcgactttgacggcggcttctatccgtttgtcgagcggagaagttcccggttcaaagtttttaatgacatagtccgcattgatgctgaatctgaaccttgtctttccgttatgttttgcatcaagcaaatgatcgacgtggtgaaatttagtcacgaatctgagctgtcccaattcgctttgtccgaaatgttcgatggctctttttaatgtatgtgtcagatgatcgattcctacgatatcagacgtacaagaggcttcaaatcttgtaaattccggcgcccgttctttcatatactcatcagcctgatccagaatctcttccacattgacatatgtccggatgtaaggctttgaccccatcgtcgtctgcaggtagcaatagtggcaatgccccatacagcccgtcgcaaacggaatggcatattcggcggatggctttgaagaatcgaatttcagtgttttccggacgccgattaccaatgttgatttcgcgttccggtattgctgcaagtgatttttccccggaatattccggacttgattatgcgatgtcgtttctctgatctcaagccccatgttttcaaacttattcttcagctcttgtcctaacgggtattcgagcgctctcggttcaatataaacaagctggggcacaaacggcttcagcatagacagacactccctttacatattctcatgttgttactttccgttcaaaagagagtgaatatgcgttgtaaacatttcctttgatcaatgatatcggtcttcttcaaaaagctcgctgtaaagcgcttccgcttcctcatatgtcgaaaagaccgcgtcatcttcggccagcggatgataggtttcgtataaaaacagagacagttctccctcatgatacgggtgatggacgatctccgcctctttaatatgggcaacattggcggcatgcggattgcggtaaatcacatagaccgtatcccccgctgcaaatgattttgtcatgataatccctcctgttgaaagttattgttccccccttttttccgaatatgaaaaaaaccagacggcttacaccgtctggctgttgtattacttattgaatgtttctttaacaaatgcgacaacctcttctgtcgtgctcatagacaagattgtttctttgaatgattcagcttcttttttagaaagcttgctgatctgcgttcttgccggaaggatggatgtagcgctcatcgagaactcatctaagcctaagccgagaagaatcggaatcgcaatttcgtctcccgccatttctccgcacatgccgacccatttgccctctttgtgagcggcttcaataacaagggtgatcagacggagaatcgccggattgtacggctgatacagataagctacgcgctcgttcatgcggtcagcagccatcgtgtattggatcaagtcatttgttccgatactgaagaagtcaacttctgcggcaaactgatctgcgataacggctgtagacggaatctctaccatcataccgacttcaatatcgtcagaaaccgctacgccggcttcgacgagtttttctttttcttcgagaagaatcgctttcgcctgtttaaactcgtttactgtcgcaatcatcgggaacatgatttttaagtttccgtatgtacttgcacgaagcagcgcacgaagctgagttctgaagatttcttgctcttcaaggcaaaggcggatggctctgtagcctaagaacgggttcatttctttagggagctgcaggtaaggaagctctttgtcgccgccgatatccaatgtccgaacgacaactgattttccttccatacgctcaagaaccgttttataagcgtcaaactgctcgtcttccgtcggaagctggtcgcgtcccatgtaaaggaattccgtacggtaaagccctacagcttctcctccgttttcaagaacgccttttacatcgtcaggtgtgccgatgtttgcggcaagctctacatgatggccgtcttttgaaacagtcggttcattgacgagcttcgcccactcagctttttgcgccaggtaagcactgtgcttttcttcatatttctttaacgtttcactggaaggatcgatgatcacatcgccatcgatgccgtctacgattaccgtaacaccgttttcaattgtccctgtagccgcttttgtgccgacgacagccggaatttcaagcgaacgggccatgatcgcggagtgtgaagtgcgtccgccgatatcagttgtaaaaccttttacaaactggcggtttaattgcgccgtatcagacggtgtcaaatcttcagccacgataacaacctcttctgagatcatgctcgggttcggaatttccacgcccagcaggtgccccgtcacacgttttgttacgtcacggatatccgccgcacgctctttcatgtattcgttatccattgattcaaacatagtaacgaacatggaagctgtttctttcaaagcgaattcagcattgactgaatctgcgctgattttctcctttaccgggttcaacagctcaggatcactcagaactaaaaggtgcgcggagaaaatgtcagctttgtcttgtcccagttcttttaaagcatgctctttaattttttcaagctcttctttagaacgtacaatcgcttcatcaaaacggcttacttcagccgcagcatcagcaatgtttttcttttcaaccgttaagtccggctcttcaagccggtatgctttcgcaatcgcaattccggctgaagcgcctattccttttaattcttgcattactcgccgagtccttcgcttttcattgtttcttctaaagcgttaagagcatcgttttcgtcagcgcctgaagcggaaattgtgatttcagcgcctttagcaatacctagagacataacgcccatgattgacttaaggtttactgttttgccgttatattctaagtttacgtcagcatcgtatttgcttgcagtctgtacaagaactgtcgcaggacgagcgtggattccggaatctgctgttactttaaatgttttttgtgccatgattatcattctcctttaaattaaagctattttactacacaatattatatcatacagccgtacttgtcatctgacaagcacggcgtatttatatgcttattttccgattttcacaatatctttttgttcccgttttacggtaccttcggccgaaagggaaatcgcttcaccctcggcaagatttgtaaagacaatcggtgtcattaatgaaggaacatgaggtttaaccgcttcaagatcaacttcaagcagcttttgtcccggttcaacccggtcaccctcagaaacaaaagaagtgaatccttcgcctttcaggctgactgtgtcgattccgaaatgaatcaggatctctcttccgccgtcagactgaaggccgatcgcatgttttgtcgggaaaacattcagcacttttccgcggacaggcgatacgacgattccttcttcaggaagaatcgcaaaaccgtcacccatcatttttcctgagaacacctggtcaggcacatcggtaatcggatggatttcgccggtgatcggagaagcgaacacttcttcaccctgctcgtttcggagcggatctgcgataacctcttcaacctgctggctgacttcttcttgcgcggatactttcggttcagggcgcggcgtgcgtccggcgataatatcctgcatctgtgtttttaaaccgtcagaacgcgggccgaaaatggcctgaatgttgtttccgacttcaagaacgcctgaggcgccaagctgtttcaaacgagtcttatccactttcttctggtcgttgaccgtaacgcggagtctcgtgatacaagcgtcaaggtgcttaatgttttcctgatcacccattgcctgcaggatttcataaggaaggtcgccggcttcgcctgaggcgcccgcaccttcatccgcagcctcttcttcacggcccggcgttttcagattgaactttctgatcgcaaaccggaaaccgaagtagtaaatgacggctaatcctaagccgaccggaatgacaagccaccaagccgtccggttaggcagaattccgaacaggaagtagtcaatcagaccgcctgagaacgtcataccgatttttacatgcagcagctgcatgaccataaaggaaagtcccgcgaatacgcagtgaatcgcaaacaggataggagccacaaacaagaatgagaattcaagcggctcggtaattcccgttaagaaacttgtcagagcggcagaacccatgattccggctacaagttttttcttttcgggcttcgcttcatgatagattgcaagcgctgccgccggaagaccgaacatcataaacggatatttccccgtcataaatgttcccgccgtcagctgtacgccgtctttgatctgagccatgaaaatccgctgatctccgcggatgatgtctcctgcggcatctttataactgaaaaattcataccagaacggcgagtagaaaatgtgatgaagaccgaacggaatcaatgaccgctcaatcatcccgaaaataaaggccgccaaggttggattcgcttccacaagacccgtggagaaggaattcagaccgtgctggatcggaggccagatcactaacataataagaccgagaattaatgcggaaattgatgtgataatcgggacgaaccgcttacccgcaaagaatccgaggtactgcggaagttcaattttataaaacttgttgaacaataacgcggccagaaccccgacgataataccgccgaacacgcccgtcgccaaagtaggtatccccagcatgttaatataggccggatggttttccgcaaaaaactttgcccgttcaattttgtcagacggaatactgccgtttgccataagcacggcgctcatggatacgttcatgaccaagtatccgataatagccgcgattccggcaacaccgtctccgttggcaagaccgatcgcaacccctactgcaaaaagaagcggcaggttgtcaaatacgatttggccggcgctttccatgacgttcgccacaagctgaacgttatcattgcttaagaaatgcatgacttgaatcatatctttgttctgcatggcattccctaacgcaagcaagatccccgcagccggtaaaatcgcaaccggaagcataagagcacggccgattttctggagaacgccgaataatgctttaaacataaaagatgtacctcctctgttagctagtgtgaccttacagcgaaaattcatgacaacgaattcactggcgcaagtcttcagtttaaccgtttacatttgcccttttacacaacaaaaaaggcatgagtaaaaagggtgtgcaaaataacgggatcgttcttcccgttttttaccctcaatcactcatgcctgatcgaatcagtgacacgtttttaaggtttcaactgaaattatgaaattttattggttaatcggtacaaatgaagcgtgagataaaccgcttccgcctcatgaactggttttttcagtatttgctgcaagatttttatcagtttccaagcagtattgtagcatagcgggtattcatttttcaataataacattaacttttctggttcttttgtctgctcttcccgattaatcctgtctatggtaaatctgatatgccggatcagccgcaaatagtggacgctttctttattcactttcatctggaaagattcctcaatcacctgaacgagccgggacatcagctgtgaatgctgattgacctctgaaaggggccgattactcagggcggagtggatatgcagagcgataaagccgatctctccttccggaaggcagattcccgtcttttcattaatcatgccgacgacttcacgggcaatttggaattcttccggataaagcgtttcggtttccatgagaaacgggtttttaatgtcaaaaccctgctgcagccgctttaccgcaaaggcgatatggtcagtcagcgcaatatggatgtgctcatttaacggttggcttgtccgcttcttgatatgataaatgacgtcattggagatgtcgacaagtgtctcgtccacataaccgaggagctttttaaattgtttttgttctttttcatcctttaagatgaacatcttgtcataccctttatcttcaatgacatccgcttgtttttttccaaagccgatcccttttccgattaagacgacctcattgtatctatcatgtgttgcgatgagcacattgttatttaataccttttcaactgtaaaggaccccttcatgatcctcagctcctttgtcattcaatacatcatatcgtacaaaacgaacggaaagcgcgtcaattctttttttagacggttgatcgttcaataaggcggtaatcaagaactttccttgccggaggcccgccgctgatccggttctcaagcatgtgaaaagcctgctttcccatttcttttgtttgtatatctattgtagaaatacctaacatcttgctgatatcatgattgtcgatgctcaaaatcgcaagctcttccgggatgcgtgtcccatttgccttggcttcaaggtaaagacctgcggatacttgatcattcgccgcaaacagcgcagtcggtttgtcatcccagctcttccatctatgaaaaagggctttcccgtcaagcagcgtcagcgccttttccacaaccagctcttccctgtaagggtgtccgatcttcttgagcgcctctttgtatgcggcgatgcggacttgactgttttttcccttttttctggccaggctgatcgctattttccggtgtcccttttctatcagataatccagaccgtgccgaaatgcttcccgatgcggattactgatggaggaaagccctgccgcatcagtgtactggcagaggatgagcggttctttcacggtaagcagatgctcatcaggaattgctttggagcagataatcaggccgtccacttggcgctcctgtaattgtgataaagcaaaacgttctttttgctgctgataatctgtctggtataaagaaagatgcacgcctgacgcttcggcagcctcggcaatacctgcaacaaggtctgcaaaatacggaagattcaccgacggaagcacaacgccgatcatatcggaaaaacctttggataaatgcacagcatgaatgttgcgcgtatatccgagcgattgcatcgcttttttcactctttctcttttgtccttacttacataaggatgatcgtttaaaactcttgataccgttgtaacagaaaccccggcagcgccggcaatgtctctgatcgtagccatggcgtcccccctttctttttttcccttgatctggaatgcgtttcatacagtaagctagagacagatacagcctatttgtttgaaaggagaagaacagcgatggggattctttgcttaatcggtttgtgtctggccatagtcggcggcagttaccttgccatgcggcccctgaatgaaaagcatgacatcaaaccatttcagcattttgatgattttttcatttaaaaggtgataaaaaaggacgctgcgttccagaaccgtccttttttatcacaaagctttctatttcagaatcgttaattctttcggatactgcgttaatgcttcggcgccgtcttttgtgacaaacacatcgtcttctatgcgcacgccgccgacatccggcacgtaaatccccggttctatcgtgtagaccatgccttctttgaggagtgtgtcgttcgcgctgctcattgatggatattcgtgaaccgaaatcccgagtccgtggccgaggcggtgcgggaaatagtctccgtatccggctttttcaataatgccgcgggcttttaaatcaaggtcgccgattctgacacctggtttgcttaattgaagcgccgcctgttcagctttaagcaccgtttcgtaaatctcttcctgcttcgggctgattgattggtatgcgaatgttctcgtaatgtctgaacagtagccgtcaagaataacgcccagatcaaacagaacgaaatcaccttttttcaaccggtctgcacccggattcccatggggctggcctgatttttccccgaacagcaccatcgttgaaaatgacatgccctgcacaccttttttcttcagctcaaactcaatctgcgcaagtacttcggtttcactcacaccctctttaagcgccgcgacaccgacttcaactccgtaatccgcgagttttgccgcttccctgagaatgctgatttccttctcatcttttacgagacggaattggttgagcgtttcttctgccgaaacaaatgccgcgccccctgaagcttgtttgagctgttctgaacgggaaagagagatcgaatccttttcaaccgcgatggaatcaagccgcacatttcgttttgtgagctcggctttgatcagctcccacggatcttcgtgatcgccgtagccgataataccatgctcccacccggcgctgcgggcttgtccggcttccattcccggacaaacgaaaaacggctcctgttcctgaaacaggaacaatcccattaaccgctcatgcggatctgtgtaaaaatcagttaaataaaatacgttttcctttgtatgtataaatgccgcatcatgtccttcttttttcagccaagatgaaacacgttctaatctgttcattttttgcttttcctccttaccaaagtgactctttattcattctatcagttttccggcgtttatgctgtgaacgaacattaaaaaaacagccgcccgatgtgcggctgtcatgtttattttaataatctcagtccgttcaatatgaccagaatcgtgctcccctcatgcccgatcacgccaaacggcagttccatcacctgcagaaagttagcgcagatcaaaaggcagatgaccgagagcgagaaaacaatattctgcttaataatccggttcattttccttgagagtctgcacattttcacaagcttgtgaagatcatttttcataaggactaagtcagccgtttcaagagccacgtccgttcccccgcccatcgcgataccgacgtcagcggttttcagagcgggcgcgtcattaatgccgtcccccaccatggcgattgtgccgtacgtttctttcagcttcttcacttcttttgccttctggtccggcagacaatcggcaacaaccgtcgtcatgcccgcctcttttgcaatggcagccgcagtttcagactgatcgccggtgagcatggctgtttgaatgcccagtgattcaagctcagccatcacggctttggcttcaggtcggatttgatcctttaaggcaaagcagcccgcaatccggtcatcttttttaacaaagaccagtgtaaaacctttatcctttaattcttttcccgatgtctgcaaaaaagcatctgccgcatcttcacctgcaaaccccgcttttccgaccatccatttgacgccttctatttcagcctgaacaccgaatccggacgtctcgtcaatcgatagatgtcctgcgggcgcggcgccccggatttcggcaaattcagctatcgcttttgcaagcgggtggcttgattgcttttccatcgcatacaccgcctgcatgatctcatcttcactcacatgttccgcagcttgaaacgccgcgactgccggctgtccctttgtgaccgtgccggttttgtcaaaagcgatcatccggacgcttcccagctgctctaaaaacacacttcctttaaccaataatccgttgcgggccccatttgagataagggaaagcgcagcgggcataatagaagcgacaagcgcgcacggggaggcgaccaccataaacaccatcgccctgtaaaaggtttcactccagctccagcctaaagcgaaatgaggaatgaataaaagcaaagccacggctaacagcacgccttttacatagacactttcgaaacgctcaataaatgcctgagccggtgacacgctgttttgggctgattccaccagccggatgatttttctgaataaagactgttcatttgttttcgtcacacggaccgttaaggagccgtttccgtttaccgttcctgtaaacacagaatctccggctgttttttccgccggcatcgcttcacccgtaagcgccgattcatcgaggctcgtcacgccagactcaatgatcccgtctgctgctacgcgttcgcccggcttaatgacgaccatgtcaccgatcttaagttcagcagccggcacccgcttttcccgtccgtccgcaagcagtgtcgcttcctccggttccagtttcattaaagatgttaaatcacggctgcttttattcatcgtatatgtttcgagcgcgccgcttaacgaaaaaataaagataagaacagcgccttcagcccaataaccgatcagggcggagccgacagccgcaaaaatcatcagcagttccacatttaacgccttcgtctcaatggtatcctcaattccctctttcgcttttgcaaatcccccgatcaggaaggcaaggatatacaaagtgacggacaggccttttgtttcggtaaaaaaccaggccgcaagaataaggacgccggatacgagcgccgcaatgagttctgcatgctggagccacttttttccggcccgctcttcttgtatgtgctgttgtgaatgggtttgtgtcatcacttgttcattcattatgaattctcctctctaattgagaacgcaaatcatcttcaattccccgataaaagtaaaacagccgcctgacaggcagcattttcacagtgttatcgcattgttttctttattatagcatgccgccgaaagatttcaattataattattttaatttctttttgataacaattatcattagcgcttcttcagctgttcattatatgcaaaaaaggtgcgggaggaattcctcccgcacctttttatttctctgaccattcttttaattgtgaggcggtcatcggaccgacgatctttttttcgatttctcctttttcattcagcagaaatgacgtgggaatcgtcatgacatcgtattccttcataagctcgcctttcgtgtcaagaacaatcgggaaagtgagatggtgctgactgacaaagttttgaacggtatttttgtttcgctcggcattcatcaaatttaccgttacaaggcttacatcatcggactgatgctgttcaaaatacgtttggaactgcggcagttcttttttgcacggcggacaccacgatgtccaaaaatgcaaaatcgttttctgccctttattcggaatcgatatctcgtctccttcaatcgtcttcatcagaaacacggcgggaactgcctgtttttctgatgaggcttttgcttcaggcatccagacggcggcagctatcaaaaggactgcacatacaattaggcggtttttatgcatatgatcttcctttcacgcgtttcggatagcttgcccttccttattgaaatgtatcagccttttcagctttcgatccggggcgctgttcttccgccgcccgtcaaaaacacggagacaccgaggtctttgcagatcgtcgcgtaatgtaaacttgtcagaagaatcatgccggtattcatgccgagtataatgccgagcatttgcaattcaggcatagaaccgagcacatacatcatcgaaagccccacaatgctgctccatacgttatgataaaacgccgttttcacatggccgataccgatcagacaggcctgaagcggcatcacaaacagatgaaaaagaaaaaacggccacaaaagctgcaaataatactgcgcttccggagactgaaaaaacaaatgggtcagcgggcccgcgaactgaaacatgacccagactgccggaatgccgtagccgaatgtaataaaaatcgcttgtctcagccgtttcagcacaatatcatattgggacagcgcatacgcttctgaaatgctgggaatcatgacgaccatcagcgaatgggcgataaatgcgggaaacgaaccgattgtcattgctacaccggcaagcatgccgtattgatcaatcgcggctgtcccggctgccccggacgccagcagcgctcctttaaccaagaagggttcaattgcgtttgtcaccgcatgaaatatacgaagtcccgttgtcgggatggatacggccaggaggcgtttccgcacgtctttcccgcgaagatgaatgtgctgatggccggaaagcgccctccgcgccaaaataaactgcgtatacaagtaaacgaacaccacgacatcgcttgcgaccagcacaaataatgaaatgagcacggccatatcaatttcaaaagagtaccattgaaaaaagataaacagacaaagcacttgaatgatttttttcatgacattcgcaaccgcgatttttcccatttgctgcacacccataaaataacctctggcgatggatgtaaaagcgacgactggaatcagcccgatgacaatccctttaataaacgggtgatacgtatcgaatacaggaatgaacggcagcgcgatgcttgcggccgcggttgaaaacgcagtaaaaacggcggtcattctgaaggcatgccggagcatgctttcatgcagcttctgattggattccgcgatgaattttgaaatggagatcggaagctccagactggcgatgacgataattaaaaaaatggtgggcagaatgctcatgtaaagtcccatcccatgctcgccaagctcccgcgccagtatcatattcacgacaaattccagacattccgcgaaaaaggcggcgatggataaaagaatgatccctttcacaaatcgattcatggtgtctctccttgtctctcgttcttccatcatcatatgagacaagttctgaaaatattttcgatttctcaaaattgaaaaaagcatagccgggatatttttgatcccgctatgcttacatcgcaaatacgtgtctgccgatccgttcgataatttttcgggaacgaatccagtggtcagatgccgttttcggattgtagaaaaacaacgcgttcgtttctctgcccggatggtcaagcgcctcatttgcggcggcgatggaatccttatccggcttttgattaatgcttccgtttgctaccggttcaaatgcattcctttgatagatcacaccccgaatggtatccgggaagccgtttttttcagtccggttcagcactacgctggctaccgcaaccttccctttataagactcacccttcgcttctgcgtgaacgagacgcgacagaagttgtctgtcagcgcgggaatacgtttttttcggcggctgataagccgtctcctccggtttggcttccttctcttggtgagatgacagctttatcggttggatagaatgcttatgatccgtttttgaaagcttcggaaccgagctttttttatttaaatcagcaaccagtgtgctgggttcttgctttggcttcttcgcaaaagtaaacagagcttctgtatgttcaatttttgatgcaggcataaaacatagaaaaaagacagccaaggcagcaaattttgtcgtcatacgatttcctccttaaatacttcactaccttaacaagagctgtgcgcaaattcacggttaaagattttccagtgctcccaatcagcttttatgatggaaaaagttcgttaacagccttgttattggcaggaaaacagccatcattttcacaacattaaccaaatagcagtaaaagtatccatcggagggattttacattttgtttacatctgttacagccagatgaaatgagaaactgaaaccaaaaaaaagactcctcaagtgcgaggagccgtcagcttcttggctgttctaaatactggaatataacatctccgccctgctgtgcaataccgcggaaatgcttaaaatcttcctgcttcgataaaactgctcgaaatgcaagaaaatgttctttctgcaccctgaattctttgatttcaccggtgcgcatttggttgatacgttctgaaatttcctcaggcagcaacgaacacagcctccttttctcggctttttcccgaaaatcaatataccatctttcccccgccgggacaatgattgagcgggctgatacccatatcgctttacttcttaaagaaaatactgcaaaatattttcaaacaggatttatgataaaggagaggaagctcgtgaaaattgctaaggttggaaacgtcattgaatttaaaaacggattaaccggtattgttgaaaaagtaaatgaaaattccgtcatcgttgatgtaaccatcatggataattatcgtgatcttgaattagattccctcactgtcgtcaaccataagaattataaaatcatcagagactcctattaaaccccctcgaacaatccgaaccatttacatatcccgcacaaaagctgccgcccggcagctttttcaaatgaactcagatctccgtcatttctacaaaaaaatcaccagtctcacctttattgtaaagatttgtgacggatgtatggtagttggttattttaccgcggaattcaagcccgcgctcaggcgccttgatgtcaaatgttttttcatacaaaaggacggcaatatcatgatacgtttcagaggtcaccttcaatacaaatgaaatcatgcggccgtttttacccgcactttctttacaatcatacattttcagccttacaccgtttaactctaacggctccataacgaacactccttctttttacaggacatgctatcatgctgaccattcctttacaattgatccgatccgaatgagaaaaaacagcgcaggcctttacaaacgtatgttccctattttataatgaaacagacgagctgccatccagcacccgtcacgtattgaagcggcgagtacactccccccgggtttactcgtctttttcttttctccaaatgatctctcttttccttatagaagttctgtgcaaatatcatgcacctttttggcggcgcggcacagacgaaaaatacccccgcttaaaaggcgggggtatttaggttatattccgagaccgtactccgtctgaaaattaacggttgtcaatcgtctccgggtacatatcataattcatcatccgatgttcggccattttttcatattttgttcccggtctgccgtagtttgtatacgggtcaatcgagattccgcctcttggcgtgaatttgcccatacttcaatgtagcgggggtccattaattcgatcaaatcattcatgatgatgttcatgcagtcctcgtggaagaaaaggcaggtcaaagtcttgtcccataagtacttgctctagacattaatcatgaagtcacaccaattttacaccttaccaaacgattgattttaacttttttggggactatttgtaatctctgcgcagtgaaattatacctgtgctagcccgccatctacgaacaattcaacacccgtcaagtaactgctttcgtctgaagcaaggaaagatacagcgtttgctacttcttcaggtgtcccaacttttccagctggaacagtatttctggcattttccattgctccttcaagtgcatcaccaaaaagctcatcgtatgcaggtgtaagaatagctcctggactaaccacatttacacggatttcagtaccttttaggtcaagaatccagttgcgaactagtgctcttaatgctgctttagatgctccatatacactaaacgctgggttgccaattgatccagcagtagagcccgttacaataatagaacctgctttgtccgggaatagtgataacgctttttgaacagtaaagatggttcctttaacgttaatgtcgaacgttctatcaacctgctcttcagtaatttcacctaatggaaggaagttgccgatgcctgcattagcaaaaagaatgtccaacttacctttttcctgctttatcatgtcatatagtttgtctaagtcttcaagcttagaaatatcaccttgaacaccggttacgttcttgccaatttggttaacagctttatcaagttcgttttgtctacgtcccgtgatataaacatatgcaccttcgtttacaaatttttgtgctgcagcaagaccaatcccacttgttccacccgttacaagcgctattttaccttcaaatttacccatacttaacactcctttagaattcattttattttacgtctagtacctttaagtacttgaagaacaacttacaagatatagtatccttcagtaagcacattatcggaagtacccacttttttgtgatatagtaactaaaaagtaataaatgtggaatggagagctttagacatgaaaaaatttagctgtgggtttgaagtgacaaaggaagttattggcggaaaatggaaaggccttgtattatactttttaatgaatggaccaaagagaacgagtgaattaaagcgcattatcccaaatataactcagaaaatgctgattcaaacacttagagagcttgaagccagtggacttgtgagcagaaagatgtataatcaagtaccgccgaaggttgaatattcatccactgaacttggagaatctcttaaacctatcttgcaggagctctgtcaatggggagtccattatgcggagcaagagtatgcagaaggtgaatatgaaattgtacaaccagaacaactaaagttaggatcgatgtagctgctgaagtaaatgctaaacaacttcaataccatcatctacagatgaagaacagtcagaaataaatgagatattcaattttgaaagtgaagttctaataagaagtgtcaaaaaagagctgtttcaaatgttaaagagaaggttcagaaacttagccaaaaaataaatgaagatattgataataatatttaatgcctatgatctctagataggcattttttctttcggataaaaaagaaaagacgtacaaattgtacgccttaatctgcttctgtactatcaatttttcactgcataaaagtcacagttcaggttgcaccaggtcacacttttattgagcttagtgcgggtcacaattcgctgtgactcggtcacaattccgctgaaaatcagcactgaatgttcggattttactgtgactccacttcgtttcacactccgtatcacacaacggaataattaccgattatcaatcgtctccggatacatatcatgattcatcatccgatgttcggccattttttcatattttgttcccggtctgccgtagtttgtatacgggtcaatggagattccgcctctaggcgtgaatttgccccatacttcaatgtagcgggggtccattaattcgatcaaatcattcatgatgatgttcatgcagtcctcgtggaaatctccgtggttgcggaagctgaaaagatacagcttcagcgatttgctttccaccattttttcgtccggaatatagctgatgtagatggttgcaaagtccggctgtcccgttttggggcaaagcgacgtaaattccgggcagttgaatttaacgaaataatcacggttcacgtgtttattcggaaatgattccaaaacctccggcgcatattcaaataaatagtttgtcccttgattccccaggagtgtaactccttctaattctgattcttttctagtcatttaaatctccctttctattaaactccccgtttattgccccaaagcaatgtatgcagctgaggcaggactctgacgagattcagatccgaatcggctgaaaccttatcaacgagtgattcgtattttccgagcagatgtgcgatcaatgcccggtcgtccgtcgtatggacgttatcgtttccgacctgaagataaaacgggatattcggataccgcttgtgcacggttttcgcgaattgcagatcttcatcattaaaaatgacgacctttaagctgaccgcgttaagcctttctgccgcatcaagcgaagacacaatgtgatcgagctttgcaaaatcggttgtcatccccgaacttggcggcttcggtgaaatcgtcaggtcgttaatcattgtgaaccaatcctgatagaccgttccctgcgtttctaaagcggcgcgcaccccgtgctctttcagcagcagaatcagcgcgtcaagctgctttaacagcgccgggtttcctcctgagatggtgacatgggaaaaggcgtctccgccgatttctctcagctcgcggtaaatgtcttccgccgtcatccagcggatatcttttttggctgagccgtcccatgtaaaagcggagtcgcaccagctgcaggagtagtcgcatcccgccgtgcggacgaacatggttttctggccgataaccatgccctccccttgtatcgtcggtccgaaaatttctaataccggaattcctttagccattcctatcaccttttttcgggcggtatacgcaatagcttgtcggggtttccctgacaaaaatctgcacgcagaccggctgattctccagtgtttcaaggtaggactgcaccttatcataaatcgttttggccacgacctcggtcgtcggcaatgaatatctgtcatcttcagaaaattcgtcatggtcattcagcaatgtatggtcataagcgccatgcaccaatttcttcagcacgctgaaattcacgagaaagcctgaatcgtccagttcatcccccgcaactgtaatatttactgtatacgtgtgcccgtggactctgctgcacgctccggcgctttcgcggggaataaagtgcgcggctgagatgtgcatatccttattcaactcaaacgaataaggatgctgaacctgcgggtaaatttgagaaagcaattagttccgctctcctttcattttcatatattcatcatatcctttattgcggagcaggcatgccgggcattcgccgcatccgtccgcaatgatgccgttatagcaagtcagtgtgttattctttacaaaatcaagcgcgccgagctcatccgcaagtttccacgtttccgctttgttcagccacataagcggcgtatgaatgacgaacggcttttccatcgccaggttgacggtgacgttgcaggatttgacaaactcgtcacggcagtccgggtagccgctgaaatcagtctcgcaaacaccggtgataatgtggcgcgcgccgatttgatatgcaagaatcgatgcaaaggataaaaatacaaggttgcgtcccggcacaaaggttgtcggcagttccccgtccttcgcttcaatttcgatatcatctcttgtcagcgcattcggcgcgagctgatttaaaagagacatatcaagcaagtgatttttgacaccgagcttttcggcaatcgattttgccacatcgatttcttcttggtgacgctgattataatggaatgtaacggtttccacttcttcaaagttttgcaaagcccataataaacaagtcgtgctgtcttggcctccgctgaacaccacaactgctttttcttttttcatgtctttctctcccttatctatcattccataaaaaaagcgcctttttcggagaaggcgccctaaaaaacataaaaaaaccgtatccaaggatacagctcgtccttagttttttatagagggtgtagctagaacctctcccgcatcaatacggattttcttcttttttcacttttgctatcataccataatgttgtttcccgtgacaataaaaaaacagcctgaaccctgtgtcaggctgcaaaagcgggtttaagccccgcgttttttccccggaaataccatcagcgcaatcccgatcagaacaaataaagcaggccagaaaacagaaaccggaatgatcggctgattcgtcatcataaaagaaagtgccgtcaaggtcagcaccgcaaccgggatgagcagcgccttctgtttcccgccgaacagccacagctcaaataaaccgaatgccgttgcaagcaggtaaacaggccatgtcacaccggagtaggaccaattggttgccgtttcaaagacaaacaagatccccgtaatcaataagatgccgcccggtacgagaagtcccgcgtttttgacaggtttcgggccgaaaatcggaatgtgaaaagcggcgcccagcaaaagaatgagagcgggccagccgcgttcgctgatgacttcatttgcattggtgaatatgccgaaaatgcccgcggcgcacagaaccgcagcagcagtcaaaagccctctttgccttctgccgaacagccaggcttcaaacaggccgaacgcaacggcaaagaggtagacaggcgatgtcacatttgcgtatgtccaatccgtcagcgtttcaaaccataacaagccgcccgtcacaagcaaaatgccgcccggaataagaaggcccgatcttttcttcggctgcataaaggcagcggcgtgaaacaaaagcgcggctgcgatgatcaaaagcggccacagccccgtcatcagcataccggcaaagcatagtgctcccacggctgtcaggatgaaagcaggaatcaatacacctaacttcctcccgccgaaataccacagctcaaacagaccgagagcaggcgcccatatataaacaggccacgtcacgcctgaatacgtccatcccgttgccgtttcaaaacaaaacaggcagcccagcacaagaaacataccgcccggaacgagcagtcccgcctgttcaggcgtttttttcgcaaaaataaatccggcatgaaaccctgcggacattataatgaaaagaaacggccacgccgaacctgcggatatatgaaaaactcccgccttctgtaaaaaaaacgcaatgccgatacaaataaaaataaatcccaataatacacgtcgagctttcatctcttactcctccccatcatttcccaattcattatacagaaatggcaggaaaaaagaaggggaattcccaaaaaatacagacattttccttatatccttatttttctttcgggatttttttgcaaatcaatgcgccgatgaaagcgaggctcacatatccaaacaccggataaacggtggaaatcagctgtccgtagccgatttggctgataatgaaagcaaacgccaaaatgccgccgtaaatatatgtacttcttatatgaagaaaactgtttaattgtttttccaatccgtataaattgccgatgaccgacgtaaacacttccccgaaaataataaacaaataaatgatatgaagcgaacgcgaatacgaatagacaacttgagccatcggaatgtcaaactccagcacatccggcagcaccgataatgataaaaaactcgcggcaagcaccagtgtcaacagaacgccgcctaaataagccccccttctgatcaccttctctgaagacatttcattcgcaagcggcacaaggacggcttgggcgagcgataaatttaacgcgccgtaagagacggcggacaaaagccaattccacttgtcaggccatacccattcgtccgcgtttctcgtgcttgtaaatacaaatgaatcagctgtcacgataaaagagaaagaaatcaaaagcggcacaaccaatatattgacgccgaacacacctttaacgccgcttgtcatgacggcaaagctcagtacgatcgtcagaaggatccccgcttgtgcgggccagccaagctgttcatgaaacagcgctcccgctccggacagcatgacagaggtcactcccagcaatataaacatcataaacatgtttacggcgcggccgatggactggccgaataaatatgtgttcaattcctgataagatgctgcgtgaatccgtttggaaatgatcatgattttggcgcctaaatatgtaaacatcagaccgcttaacacgatacccaacagaccgatccagccaaacttcagaaaaaactcaacgatttcccgtcccgtggcaaaaccggctcctacaactgtgcctacgtatacaaatgcaagctgactcgcagaaccttttgtttgtcccatttcaccctccggctaagcgcagatttgtccaggcctttatatatgcttatgagacaagtcgcccgaaaagacgaacaaatcgtccttccccggagaaaacagattcagctctctcctctaagcaaaaatattgaaagaaaaaaagggccggcgtatactcttcatcaagaaaggtcaaagcatttcatttcctttctgactatattggtcaaaaataatcagacttcacaaatatcacttatcatgctgtaaacatttatttttcggggtttgaaacaaaacacttgaaagtcaaagaaggtcagattatactattaatcaaagaaggtcaaagttaagaccttattttctaatccatttggtcaaagatgatcaaacatttttcgaggaggttttggcaaatgcgttgtcaacattgtcagaaaaacgaggcgacgattcgcctgaacatgcaagtcaattccattcaaaaacaattcgttttatgtgaaacatgttatacagaattaacccgaaaaccgtctatgagcatggggccgcaatcattcggattcccgtttgagcaaggtttcgctcccaatcaaaataaacagcaggccggccctgaaaaaggcctgctcgacgagctcgctcaaaacgtcacaaacggcgcaaaagcaggtctgattgaccctgtgatcggccgcgataatgaagtggcgcgcgtaattgaaattttgaaccgccggaataaaaacaatccggtgctgatcggtgagccaggcgtcggtaaaacggctattgcagaaggcctcgcgcttaaaatcgctgagggcgatgtgccgaacaaattgaaaaacaaagagctttacctgcttgacgtcgcttctctcgtcgccaatacagggatcagaggccagtttgaagaaagaatgaaacaattaatgaacgaattaaaagaacggaaaaacgttatcttgttcattgatgagattcaccttcttgtaggcgccggctctgccgagggatcaatggatgccgggaacatcctgaaaccggcgcttgccagaggcgagctgcaggtcatcggggcgacaacgctgaaagagtaccgccagattgaaaaagatgcggcgcttgaaagacgcttccagcctgtcatggttcacgagcctacaatagaacaagccatcagcattctggaaggcattaaagataaatacgagaaataccacggcgtcacattcagcaatgaagcgataaacgcctgtgttacgctttcatcccgttacattcaggaccgccacctgccggataaagcgatcgacttattagatgaagccggctctaaggcgaacctggagcttgataccgtaaatgaagaagatgcggctgagagactcaaagcaattgacgcggagaaaacaaaagcgcttcatgaagaaaattatgagcttgccgcgaaactgcgtgatgaagaagcggcgttggaaaagcagctggcgcatgaaacaccggcctcttcacctgaaatcggggcggagcatattcaagccatcattgaacagaaaacaggcattccggtcggaaaactccaggctgatgaacaagtcaaaatgaaggaacttgaagagcatcttcatcagcgcgtcatcggtcaggaaaaagccgtgaaaaaagtggcgaaagcggtcagacgaagccgcgccggcttaaaatccaaaaacagacctgtcggctccttcctctttgtcggaccgaccggagtcggaaaaaccgagttatcaaagacactcgcagatgaactgttcggtacaaaagattccattatccgtctcgatatgagtgaatacatggaaaaacacgccgtatcaaaaattatcggttcaccgccgggatatgtcggacacgatgaagccgggcaattaacggaaaaagtgcgccgcaatccgtacagcatcgtgctgctcgatgagattgaaaaagcccaccctgatgtccagcatatgtttctgcagattatggaggacggccgtctgacagacagccagggcagaacggtcagcttcaaagataccgttttgattatgacaagcaacgctggaaccggcgaaaaacaggtgaaagtgggattccaatctgaagagagcgtcctggaagaacaaacgctgattgattcactgagcgcgttcttcaaaccggagtttttaaaccggtttgacagcattattgaattccaatccctgaaaaaagaacatctcgtgaaaatcgtcagcctgcttctcacagagcttgaagacacattaaaagagcgcggcatcagcctgaacgtcaccgatgatgcgaaagaaaaaatcgctgaaatcggctaccacccagctttcggagcacgcccgctcagaagaaccatccaagaattgatcgaggacgaaatgacagatctcttattggatgacaacgaaataaaagccttccatgtcgtaatggaagaggacggcatcaaagtccgggcacaataagaaaaaagcggttccctcctcgcggggagccgcttttttgtttctttctccatgccggaagggagaaactgtgaagaattcgggaacaatttctcaatcaccctaaagttccatgcactgccaccgatattaaccatagaaagctagtataaaggatttggtgaaaactatggataaaacatcgattatcggtatcatcctcgccttgattgctttaagcgtgggcatggtgctgaaaggggtcagcttaagcgcactcgctaacccggcagctattctgattattttgttcggtacgatttctgcggtgatcatcgcattccccggaaaagaaatcaaaaaagtgcctgccctttttaaagtgctgtttaaagaaaacaaacagctgacaattgcgcaattaattcctatgttctctcaatgggcgcaaatcgccagacgtgaaggtctgctcgcattggaagcaagcattgaagacgtggatgacgcatttttgaaaaacggcctgagcatggcggttgacggacaaagcgcagaatttatcagagatattatgactgaggaagttgaagcgatggaagacagacaccaggccggcgcagccatctttacacaagccggcacatatgcgccgacactcggcgttttgggtgcggtcatcggccttatcgccgctctttccaacatgaacaataccgaggcgctcggacatgccatcagtgcggcgtttgtcgccacccttctcgggattttcacaggatatgtactatggcatcccttcgccaacaaactgaaacgcaaatcaaagcaggaagtcaaactgcgtgaaatcatgatcgaaggcgttctgtcagtgcttgaaggacaggccccgaaagtgatcgaacaaaaacttctcatgtatcttcctgcgaatgaacgcgcaaaagtcgctgaacaagaaggagaggcaaacaatggcgagaaaaaagaagaagaagcatgatgacgagcatgtggatgagtcttggctgatcccgtacgcggatttgctcacccttcttttggctctgttcattgtattgttcgccatgagctcggtcgatgcggcgaaattccaaatgctgtctaaatcatttaacgccgtgtttaccggaggcacgggtgttcttgaatattcaagcgtcacccctcctgaaaacgaaaaagacggcgttgatcagttaaaaaaagacaaggaaaaagataaagaacagaaaaagaaagaaagagaagcagccgaccgtgaagaacttgaaggcgtgcaaaagcaagtcaatcaatttataaaaaataaaaagcttgaaactcagctggaaacaaagctgactaaagaaggactcttaattaccattaaagacagtatcttttttgattccggacgggcggatatccgtcaggaagatattccgcttgccaaggaaatctcgaatctccttgttctgaatccgccgaggaacattatcatcagcggacatacggacaatgtgccgattaaaaactcacaatatcaatctaactggcatttaagcgtcatgcgggccgtcaacttcatggctattctgacagaaaacccgaaacttgacgcaaaagtattcagcgccaaaggtttcggagagtataaaccggccgtgtcgaacaaaaccgctgaagggcgcagcaaaaacaggcgcgtcgaggtattgatacagcctagaaacgccgcgactgaccaaaatcagtaatataaaaaaggaagcctttcaaatggcttccttttttatttctgatgaaaatgttttgcgtttaaccccactcttttcagcatttccgtacacatttctatctcttcatcactcagcacactgatcatttccttaatttcttcagcatgatcagggaaaatatcgtccaaaagacggattcccttttcggaaatctgtgcgaaagtcactcttctgtcagtcggcgaggcttttctgatgagaagttcttttttctctaatttgtcaacaacgtatgtaatacttccgctcgctaataaaattttgtcgccgatctgctgaagcggctggttgcctttgtggtacagcagctcaagcaccgcaaattccgtcgggttcagaccgtgcttatgaatatgtttattcatatggtcgttaatagatcggtacgcacgtgacagtacaataaataatttcaatgagttttctgttttatccgtcatacattcaatcatccttttacaaaagaaaccgttacagagaaacattaataaacaaaatgaaaaatgtcaacaaaaatgtttccaaaatttctcttctttttgtctgaccttaataaaataatttgtttttctatcattttggttattttttcttattaaagaagtataaagatgatataatacctctattcaagtgtaatgttggagcgatgcagagtgaatacatttaaaggtgcccggggaaagatcaagctttatctcatattggtgatcatcccggcacttattatcagctttttcatttatgaaaaagaaaagcagaaaatagccgataaacacatacaggaagccagtatgatgctcaaccttcaccgcaataagctcaattatttaatcggtgaaacaaaagcccggatgacaacacttgcgatcgctgtcgataagcctgtcaatgaagaaaagatcattgacattctcgatcaggcttttgaggatgaacctagattcagcggactgtatatgctgaattccaaaggtgatgtcatcgcaagcacgactgatctgaaatcaaaggtgaatttggccgacagaccgtattttacgaaggcgaaaaagacgaaaaaaacggtcatcacaaatgactactccagcagaattacaggccagcgcatcttcacgatctgcgtgccggtgttagacgcaaaacgggaagtcacagattatttagtagccgccatacaagtcgattatttgagaaatatgatcaatatgctgagccctgacgtttatgtcaaggcaaccaatcagaataaagtgatatttgccagcggacgggctgatcaatcagaaggtgtgaaaccggtcagcggctatctggatgatattaattggaatatcaatgtttatccgaaaccggttgagctgaatgagctgaccaaaagcgtgctgctgccgatgtccagtattgccgtgctgctgaatattctgttcattctcgttcaatattatctgcttaagcgcaagacccagctggagcgcgctcaaaatgaagcgcagaaattggagctgatcggaacgcttgccgccagtaccgcccatgaaatccgcaacccgcttacagggatcagcggcttcattcagcttttgcagaaaaaatacaaatcggaggaagatcagctgtatttctcaattattgagcaggagattaaacggatcaatcagattgtcagtgagtttttagtgcttggaaaacccactgctgaacggttggaagtgaactcgctgcaggatattcttgatgagattatgccgattatttattctgaagggaatctgtataatgtggaagtgaatgtggagattctcgtcaatcggccgctcaaggtcaactgcacgaaagaccatattaaacaggtgattttaaatgtcgcgaaaaacgctttggaatccatgcaggaaggcggccggctgtccatctatttagaagcccgcgatcataaagcagtcattaaggtggccgacaacggaatgggcatttctgaagatatgcttgaacacatttttcttccgtttgtaacgtcaaaggaaaaaggcaccggcctcggccttgtcgtatgtaaacgaatcatgctgatgtacggcggttcgattgacattcaaagcgaagtcgataagggcacagaggtcaccattaccctccctgccgcttctcgatgaaaaaaacaccctggatcggggtgttttttaattacagaagaatatgtgtaagaggatataccagaggaacggcatcatagccggcagatagtacgaggcgcttcgtgagccgtgccggcggaaaaatgtgctgactgtacgcggtcatctttcggatgcggcgcttgatcaggaagcgcattcagtcttcgttatctgttttatcatcaatcatttgtttgcttcatatgcaggcatgacgtcaccgcgggagaacaagcctattttcttcacaaggccctgtattccttggtgatgtgtgcgatcacggtttaccagctgctgatacgcgttcatcagacagtccagttcctggctgtgcctgatcgtgtcatatcctgtaaacccttgcctgttagccgcatctatcatcatttttctttttttatcaatagatacaagcaatttttcttgttcagaataactgcccattcacttcacccctcaccgctaaaagaataggaaacaagtttgattgggttattgagcattattacagattatactttatttgtaaacatttttttactaaataacttattttttcatttcgtattggaatctttgcatgaatacgagaacaatacccattcgggtaatgatataaacagaatgcggcatattcaagatttaaaaaacagccacagctgactttacattacaataaaaaacctctcatgccggcgggggcatgagaggttcggacgtctatcagttttgcacactttcattctcgtaaatcggcacccagccctcagtcgtcacgaagattcggattgcgacgacccggcggtcttcctgaagcgtaaagtagtggcggatgttctccggaactgaaatcaaatctcccggatttaaacgaacgtcgaaaaatgtgccgtctttgccttgaatgacgaagatgccgtgtccgctgacgataaagcggacttcatcatccgtgtggtgatgttctctttggaaattttttaataattcatcaagattcggcgtggtatctgataaagaaatgacatcctgagactgatatccgcgccgggctgaaatgtcctgaatctccgtgtcaaacgccgcgagaatccgttctttttcatcttcggttagatcgaatttttccgaaagcccagacggaagtttttcaatgttccactgctcatagatcacctcttgttcgtctaagaagcgcgctacttcttcctgtttttcaatgagcgtattcttttcgtcatgaattctgatggtcgccattttctattcctccttttattttaccagctgcggacgaagtgacagaagcttgaggtgacagctgaataaaaattcataggcttccagcacccttttcgcttcaaatgcggtccgcccccatgccgtaatgccgtgattgcggattaacaccgcgcctgagccggcgtccgcatggtgcgcgaagttttcagccaatgccgggatatgcgccggattgtcaatgatcggaacggtcacggacgcgttttcctcccataatccgagcgccttaatcatctcctgcccctgaaaagtgatttgtttttcatccccgtaaagctctgagatgacattattattgacggtatggacatgcagacagcagccggcgtctgtcttttggtataagtaagtatggagaagcgtttccgctgagggttttaaagaatggccggtctcagcgggcttcccgttcttatcgattaagagaaaatcttcgtctgtttcttttcgtttgtcttttccgctcgccgtaacgagaaaagtcagcggcccgtcggatactttgatggaaagattcccgctcgttgccgggaaccagtctctttcggccagctcgcgttttacctcggcaagttcgcgccagcgttcttcttttgcacccatgcctgcacctccccgatgttttcaatgcctgttttcacctcatgaaaatcttgaaaaggcagatgccggaggccgagttctttgcattcagtcaaaagataatctctcgcaaagcacatatcggataactttgcagcctcgacatccgtgaccgaatcaccgatcataacgagaaatttctgctgatcggatagcttccgaatgactgacggtttgcagcagccgcattgattggtacagtctccatcacaagcgtgcggccagtctatatgaatatattcattgtcaaaggatgcatgattgcagaaaatccgctccttttctacgatcccttccaaaagcggatgcacaaaaaagtccattcccccgcttacgatataaaacgggagaccgtttgaccggacaaatgagacaaaatccaaaaagccgtcccgtattttcgcatccttcaggataaagccggtcagttcttcttttaagctgctcggcagcagtccgaacatccgtccgactccttcttggattgatatgcttttagacagaacaccgtcttttaatttaagccactcaggaggcgcgaattctttcatcatgctgacaatgttgtcgttcatggtgaccgttccgtcgaaatcacaaataatcagcggcgtgcgggtcatacggcttccacccttccccatttgtctaatgcgagctgaagatctttgcacgacgcggctttttcttcaatcggctgcgcttcaagcaccgcatcaatgatggcgcggaacgctcttccgccgccctcggctcctttcggatggccgtgaatgcctccgccggcattgatgatgtgatcgatgccgaaatcgcgcatcaataatggcaccataccggggtgaatgcctgctgacgggacggcaaacgacggatgaaagacatcgtcttttacacattcatcatggattgcaagtgcggactccttcggaagagcaacggatccgtaaggtgacggaaataaactgaaatcagcgccgcaatagcggttcagcttgccgagcaaaagcgcatgcgacaagccgtaaacgggagatgatgtgaacgcgccgctgactgccggatgagccatgatcggaagcgggatttccctgtcttcagcaaggctctgcatcacatctaaaccgtaagcgaacacattcaataaaagcgcgtccgccccgagttctgccgcgcgcctcgctttatcccgcaattcagcggtccttcccgtaaggtttacggcatacagcgttttatgccccgtctcctcccgggtttccttcaggacttgttttccttcgataatgcgggtttcaaacggagccagttcattttcaaagaaaatttcgtcatctttaatcagatccacgccgccgagcgcctgctgtctgagctgttctttaatgtcggcgagatcccgtccgatcacgcctttaaatatgctcatcagaagcggtctttcaaattcgcccagcagtttgcggatgccgtatataccgaatttcggcccgggaagggagcgtttaaacccttcggaaaattcaagatcagtcaattttatttttccgtccagtgacagctttccgaataccgtcgtcaggacggccgggatatctcttgaaaagttcgcctcgggataggcgatggtgatgacggattgtgtttcgttttctgaggttccttctatctcctcaacttttacgacccgccctttatgttttctgagctgttcctgcttcaccaggggcaggtcagtccaggagcctactgtcagccccgccgcaatctgttccgcccgcttttcactgtccgttgtgtctgtcagaagatatgttgccaatacctcgctcatgcgtgaacgcctctctttctttcgcaaaacataaaaaaacctcttccgtatgagcagaaagaggcttcgtgttatgtccgaatcttatctctcagctcctgctgcaagaattagcaccgtgctttatcagtcggttgccgggcttcatcgggctcgtccctctgcctgctcttgataagaataatgattttataaagtattttgaattatcgcattgttatcctgatatgtcaatgctttttcgggtgaaaagattcagtttcccgatccgttccgcagcttctttaagtctttcttcacttgtcagaagaccgactcttatatagccttccccccattttccgaacccgtttccggcagcgaccgcgacatccgctttctcgagcagcagatctgaaaacgactgtgacgtataaccgtcaggcacagggagccatgcaaaaaaggagcccgccggagccgtcacatcccagccgatatcgcggcaggctttaatccatgcattgcgtctcgattcatatctgtcattttgcgctgcgacgcatgcctgatccgctaaaagagcggctgccgccgcctgctgcgccgcgggaaacaagctgacaaacatatgatcctgatataggttgatcgcttcgatgacagaagcgtttccgacggcaaatccgacccgccagcccgccatattatacgttttggacaaggtatagatttcgattcccgtctcttttgcgccttcggtctgcaaaaagctcagcggtttatgcccgtcaaagccgacggctccgtacgcgaaatcatgaatgacacaaatgccgttttgttccgcaaatccgaccgtctcctcaaaaaacgcctcagtcgccacagcgccggtcggattattcggataattgagatacagcagcttcgcctcgctccgcaccttttcaggaattacgctgtaatcagggagaaaccctctttcttctgtcagcggcatcatttccattttcgctttcgcaagggcgacgcctgaccagtaatcaggatatccgggatcaggcaccagaatggtatctccggggtttaaaagacattgcggaagctcaacaagtcccgccttgcctccgaacagcacggcgacttccgtttccggatcaagcgtgaccccgtactccctttcataaaatgcagcggctgcttttttgaagctgtaagcgccccggaatgatgagtatttatgattttccggcctttcgacggcgcgcttcatttcttcaacgatatgctgaggcgtcggctgatcagggtttccctgccctaaattgatgacgtctctgccttctttcagcttttgattcactttttgcaccaatgatgcgaaaaattgttccggcagctgtttgagtacatctgagatttcaaagttcatattttcaccttctaaaaatgtcttgaaatgatagtccatcatcatatatggttaaataaaaaaagtaaagagaaacttgaggtgttaaataatgaaatggaccatttcctgtttgcaatttgatatttcatacggaaatccttcagaaaactttaaaaaagcagaatctttgattgagcaagaaagccgccatgcggatgtaatcgtgcttcctgagttgtggacgaccggctatgatctcacacggctagaccagctggcggatgaaaatggcaacgtttcggaacaatggcttaaagaaacggcaaaaacatacaacgtacacctcgttgccggatcttttgcggtcaaagaaggcgaaaatgtctataacaccatgtacatcgccgataacagcggacagatcgtgaagcggtatcagaaagcccatctgtttcagctgatggatgaacacctttacttggcagcaggaaacagcgacggttcctttgagcttgacggtgtcaagtgcgccgggctgatctgctatgatatccgtttccccgaatggatcagaaagcatacgtcccagggcgcgaatgtcctgtttatctctgcggaatggcctctgccccgccttgatcattggcgaagcctgcttatcgccagagcaattgaaaaccaatgttttgtcgcagcctctaactgcacggggtccaatcccgataatgaatttgccggccacagcctgattattgacccgtggggccagattttagccgaaggagaccggacggaaggcgccgtccgggcggaaatcgatgtgtcagaaagcgcggccgttcgcggaaccattccggttttccaagacttgcggcgtgatttatattaattttcaaaaaaatgttgacaagaatatccggcacctgctaatattttcatcaactgattaatccgaattgtgatacaaatcaatatatttttctcttatcgagagttgggcgagggattggccttttgaccccaacagcaaccgaccgtaattccattgtgaaatggggcgcgtacattttgcgccgagacgattgtctcataaggcacggtgctaattccatcagatgttatctgagagataagaggcggactgcactgtttcagcctccttctctttcagagaaggaggctttttttcgggcgtattctccgtcacgatctcttactgccactacataattggagggtaaatccatgtcagcaactaaaacaagtctttatgaacaattaacagaaagctccgccgccgcgttagccgtcaagctcggcttattccaaagcaaaagcactctgacatgccgtgaaatcggcgacggcaatttaaattacgtctttcatgtttacgataaagaaaacaaaaaaggactgattatcaaacaggcgattccttacgcgaaagtcgtcggtgaaagctggccgcttaccattgaccgggcgagaatcgaaagcagcgccctcatccgccagggcgaacacgtgccgcacctcgttccggccgtttactattccgatactgaaatggccgtcacggtaatggaagacctctcccatttgcggatttcaagaaaagggctgctggaagggcagcattatccgaacttatcggttcatatcggtgaatttttagggaaaacgcttttttactcatccgattatgcgcttgatgcgaaagtaaagcagcagctcgcaaagcagtttacaaatcctgagctttgcaatattacagaaaggcttgtgtttacagaaccgtttctcgaccatgagacaaacgattttgaagaggagctgcgcccatacgcagaaaaagtttggaacaattcccggctgaaagaaggcgctgacgaattgaaagccacctttctgaattccgcggaaacattggttcacggcgatctgcacacgggaagcatcttcgccgatgaacatgaaacaaaggtgattgatcccgagtttgctttcttcggaccgatcgggtttgacatcggccaatttatcgccaatctgctcttaaacgccctcagccgcgacggtgacgacagacagccgttatatgaccatactgccgccgtatgggatacatttgtgaaaacattcagtgaagcatgggagaaagactgcctgccttcccgcagacacctgctggaagacacactgaaaaacgcgtttgaggaagcgatcggttttgcgggatgcgaattgatccggcgcacgatcggactcgcccatgtggctgacttagatgaaatcactccgtttgacaaacgaatcgaacggaagaagctggcgcttgagatcggcgcctattatatcgaaaacagaaaaaaactgaagcatatcaccgaggttctggaccaatttaagctccgtgtaaaggaatgatgcagcatgaccaatgaatttgccatcccccgttctgtagaatggaaagaaacctacatccgcattttaaatcagcaaaagcttcccgacgtcactgaatatgcggaacttgaaacaaaggaagatgtattcgacgcgattgtcacgctgaaagtaaggggcgccccggccatcggtataaccgcggcgttcggactcgcgctctccgccaagtcgtttgaagcccgcgacctttcggatttccgacgtcagttcgcggatgtcaaagcgtatttaaacagttcgaggcccactgccgtcaacctcgcgtgggcgcttgacagactgacggattccatcagggatgcgatctcaatcaatgaagcgaagacaacgctcgttcatgaagccattcaaattcagattgaggatgaagaaacatgccgtatgatcggccaaaatgcgctgcacctttttaaaaaaggcgaccagatcatgaccatctgcaatgcgggctcgatcgccacaagccggtacggtacggcgcttgctcccttttacttagcgaaacaaaaagacctcggccttcatatctacgcatgtgaaacaagacccgttctccaaggatcacggctgacggcgtgggagctgatgcagggcggaatcgatgtcacgctcattaccgacagcatggccgcccatacaatgaaggaaaaacatatttctgcagtcattgtcggcgctgacagaattgcaaaaaacggtgatacggccaacaaaatcggaacgtacggcctcgctattttggcaaacgcctttcaaattccgttttttgtggccgcaccgctttcgacatttgacttgcagattgaaaacggcgatcagattccgattgaagaaagagatccggatgaagtcagacagatctccggcatacgcaccgctcccgaggatgtgccggtcttcaatcccgcctttgacatcacaccgggcagcctgatttccggcattataaccgagaaaggaattgtgaccggttcttacacggaagaaattgaacaattattcgctgactgccagctgatctgaaaaaccgctgatgatgttgcctcaggcaatgtcagcggtttttttgtctgcacaatgtaatcacttcatctttttggacggctgtaatgagatgcattttaaaaaacagctctgcataaccggctatcttttgcgggcggctcattttcatcaggcttcgtcctcctttttcatcagaccaacttttttcacttaataaaatgatatgtcggacgtgaaaaaacggaacgtgccatacgctttatttttctttataggatatttgttcgatgttcagcagcaccgcttttacatccgtcttcgtgcccgcgtatcccgttaaggcgctgtttttgccgattacccgatggcacgggatcaaaatcggcagccggtttcgtttattggcttgtccgatggcgcgcaccgctttcggttttccgatcgcttcagccatatcgccgtagcttcgggattccccgtaaggaatcatcgtcagcgcgttccatactctttcctgaaagggtgtgcctttttgtctcagaggcagagagaattgctttctttctcctgaaaaatatgacgtcagctgctgtttcgcctccgacagcaaagcggtttcgcacggctttacgccgggcgcgtctttccgccatttctcaaaatcttccccggtgagaaacaggccggtaataaagctctcttcctctgttacgatgacggttccaaacggcgctttcacacttgtaaaacagatcattccccgctccttctttcttccgtattctgccggaccggaagcgtcaaatgaaaaaccgtgcccttcccttcttcactttccacatgaatgcgtccctgatgttcttcgatgattttatagctgaccatgagaccgaggcctgttcccctgtcttttgtcgtgtaaaatggttcacccagacgttttaatttgtcttcggaaatgcctgttccttcatcttgaatagaaatcaaaatgtggtcttgatcagaagactgaatggtcacgtagatattgccgccgcccggcatgacttcaattgcgttttttaaaatattgataaacacctgttttaattgattcggttcacagtaaatcggcgggatgtttccggtcaggttcagatggatctgcacattgacaagattggcctgggcattcaaaagatcagccgtgtctttcataatctgcgtcacgtctttttcttcatataatatcgcctgaggtttcgctaaaattaaaaattcagtgatgatagactcgatgcgttttaattctgaggtaatgacgttaaagtacagagaatattcgccttcaatgcttccttgaagaagctgaatgaaccctttcagcgccgtcatcgggtttctgatttcgtgggcgatgcccgccgccagctcccctacaacatgaagagtgtcggatttccgcagcctctcttcaagctctttggcctctgtgacatctttaaagatggccagattcatattttgaatgatatttcttttgaaggagaattccagtttgcggctgtcgctgctgcttaacaggaaggggatttcattatccattccttctaaatcaatctttctggcgggaacacccgcgttttcaatatcaaataaagaaagaatatccggaacggtgtacgctctcagctcctcatccggcataccgagtatacggcttgcgagaggattcgcgtcaataatgcggaattggttgtcaaataagaccttgccgtccattgagccgttgaatacttttctgaatttcagctcgctttcccgcaattctttttccatccgcttacgatcgctgacatttcttaaaatggttaaatgctgaccttcaagtatggttcgttttgatgtgaattccagctctttaaattggccgtttgccatctgaaacagcatctcttcacggatttctccgtatttttcatattttttcttaatctgcttatattttttctgcggatcaacgataaacgtacataaattccgctccaccagcttatccatcggcagttcgaaaatgcggcacgccgattcgtttgctttggcaatctttccgtcatcagaccaaatgacaatcgcgtccatggcgttttcaaaaatttcgcggaatcgctcttcgcttttaaagagtttcaattccatcaatcgtttctctgttatgtctctcataatagacatgtagaacccgctgattaagttggacgtaatcgtaaattcaaacagcttctcttcgccggaccgaagcttgacaggcagttctcctttggcgtttccttttctgcggagggtttcccagatttctttcagatgctttttgttttctccgtcggtaaaatggcggagcgacagatgggacaattcattctggccgatctcaaagcttttgcaaaaagagaggttcgcatcaataaacccgccgtccttatcaaacagcacgatgccgtcgacagccctgtcaaacaaatctttaaacagctgctcgttcatggagaactcgcgctctaatatttttttagaggagatatccctcatcaccacaaaaaaataatcctccccaattccgtctctggcgaggaattcaatgtatttcgtcgcgccgctgtcaagcttaatcggcacctctttccacagatggcctttttttaaaaactttttcacggccttattcagttcttcctgaggcacggaatataaaaaatccaggacggagcggttaatgaggctctctgcctcaatctgcatcatccgggccgcagcctcgttcgcctggacgattttcatttccttacggcatataaaaatggcatcaagcgtgttattcataatcacgtgataccggttcaaatcactcttcaggcggtcattttcctctttcatccgcttcagctgctctttcagcgactcttttgtttgcaaatccagagtttcagccattcagtacactccttcttcaaaaacctatccttcaatatttctacaaaatacctcatcttccttcattcgccctatacatttcagaaaatttcaatgatatgacaagttaaagtctttttctacgatccttacctccccattacatcatcctaacaatcccttttgtcctccttcaattttttattttttattttaaaatgaacaacaacaggaaataatcatgcagtggatgatttttgaagagaaggtgatgctatgacaaaatcgcgagacagttactttgacaacgccaagtttatcttgattttcctggtggtgttcggccatatcctccggtcatttattaacggaaatgagtttatgctccatctctacaaattcatttatacttttcatatgccggcctttatcctggtttccggctatttcgcaaaaaactttaagcggaaaggttatgtgaagaagctggctgtgaagctgattattccgtacctgatttttcagggcatttactcagttttttactatttgattcaggatgaaagcatgacaagcgtcaatccaattgatccgcagtggtctctctggtttttagtcagcttattcttttggaatctgctgctttatccttttacaaagctgccgaagatgtgggcgcttggggcgagctgcgggcttgccgtcatgatcgggtatcttgattttatcagcagcacgctgagtctttcacggacgtttgtttttcttccgatgttcctcgtcggattttatttaaagaaacagcactttgatttgcttcgggctaaaagaggcaggcagattgccgccggcgtactggggattgttttcctgttatgctggtgtattgattttgattactcgtggctgttcggatcggagccttattccacattcggcacagtgtcgctgttgagcggtctgtcgcgcatcggctggtatgttttggcctttgccgccactttcagctttttggcgctcgttccgcaaaggcgttatttctttacgaaatggggtacgagaacgttttacgtgtatctgctgcatggattcattataaaaacgctgcggcagatcgggcttgaagatcacttgtctgattatcagaatttagtcatgctcttaattttaacggccgctcttacgtccattctctccagcaatgcggtgaaaacggccgcacagccgtttattgagctgcggataaccggcttgcttgaagcggtgaaaggaacaagaaacggtgcttattcgaaataatgcaaaatacctcttaagcgttgccgcctaagaggtattttttattgtttgccgtcttcttttttctttggcttcgtctgttcaagcgtttcaatccattttccggcgttataatcaccgagctcgcttgcaaactcttcttcaagcaatttagggtccatcggctttttatggttttgcatgtctttgctgtggcggttttttttcgtcatgttactcgcctccttgtttgccgtgttttgatttgcggtttgcgcctctcagtccgggatcaccgtcatattgtgttttgtatgcatctttgtccatgctctcagtcggtgtgttgttgttggtcaaagcttcattctttgctgctttgcgtttcatttgatttcctccttctgtcagcaaatctgttttgaattcatcaagcattttttttaagtcgcgcactgtcacgtttttggcctcatcaatgagttcatagccgatctgtccgttcggctcaagcagcacatatttaaaatcttgaatgtctccgaggccttcctgcctgatcctcattgacagctgagcttcggtaaaacgcattttttttaaattttccgggatgatttttccgtttctgacaacggcgacggtttttcctgaaaataaaaactcaaaaaagcttgatttgatttctaaatattccatcaggattaataccgcaataaaaatcgccgccgcgaaaatggtttcccgtaaattatgttcaataaacggctgaataataatcgagccgatcgaaatcatgatgactgtctgggtcaccgacagctggctgattgatttccgtccggcaatccgcaataaaaaggtaccgaccgctatcataactaccgacttccaaaatacggcaaacaatgacgtcacctctttacaagtagaatctccaaagaaactgtttccactcatccattttacggcaataaaaaacaccgctttctaaaaagcggtgtcagccgataatcattctttccttcggatagtgataatttgcttcgatttcttttcggccgatcaaataaaggaacgtcaaaatgccgatccggccgataaacatcacaatcatgatcacgcattttccgatgtcgcttaaatgcggagtaatcccaagcgacaggccggtcgttccgaatgcggaacacacttcaaaaagcagtccgaggagcgtctgatttttctccgtcacggacagaatcagcgtcgatccgaacacgagcagaatcgccatcatcgtgacgaccagcgacttcatgacatcagcctgatgaagctcgcgtttaaagaccttgaccgctttattcccccgggcaaaatgaaacagggcaagcaggttaagcgcaaatgtcgtcgtacggattccgccgccgaccgagctcggtgatgcgccgataaacatgagggcacagatgaaaaataatgtcggcgccgacagctggctgatatcaattgtcgcaagcccgccgcttcgcgtagcggttgattgaaagagacataaaaataaaacatcatgccagcttttccccttcatgacatggcttgcttcaagcgcgtaaatgcccacggctccgaacaaaacgagcattccgaacgtaacggtcgtaattttcgtaaacagcgtgaatgagtatctgcgctgttttgaaaacaaaaagtcttttacttctacgagcaccggaaaaccgatcgcaccgaaaataatcagaagcatcgtaataaactgcacgaaatagtcatgtctgaacgggacgagtgaatttcccgtaatatcaaaaccgccgtttgtcgtggcgctgacgctcgcaaagaatccgtgcaagtacgcctgttcaaacgaatcataatacgttaaaaaatatgttcctaagatgatgccgcctaaaaactcgattaataaaatcaaaaacagcacttgcttcatcaggttgacgataccggaaaactgcgattgattctgatccaccatgatgagcttccgttcccgcagaccgatccgtttgcccataatgagccagacgaatgttccgagcgtcatgatgccgattccgccgaattgaagcacgaaagccaaaatgacaatcccggccgtgctgaatgtatcagccgtgttgacgaccgttaaaccggtgacactgactgagctgacagccgtaaacagcgcgtctataaacgaccagctggccccttgtttgtgggcggccggcagacttagcaaaataaatgccaccgttacagcaagaaaataatataatgcaatcagctgtgcaggcgacaagatctgtatgaatttcttcagttttaatttcataagatagttccttctgcctctcaaatgtagtacgtaattattctaatgatattgggagaatttttaaaggtctttttagaaagatttttcattaccttatgtaatttgccgatctttaaacaaaaaacctctgaaacgattgtcagaggttttgttgattattttgcttccagcctgcggatgcgctcatcgagatcagggtgtgtggagaacagtgacgaatgctttttgccgttaatttttaacgtctgcaccgccgtctggtcctcttcattcacatgtcctgtataagacttcagcgtacgcagggcgtgaatcattttatccttgccggcaaggtctgcaccgccgcggtcagcgtgaaattctctatgacgcgagtaggcgaagacgacaagactgccgagaatggaaaagataatctgaaacacgatcatcgcgataaaatgaacgaccggcgcgaggtcttctttgacaaagcggcttgcaatccatgccgcgattcgggaaaggaatacgacgaatgtattgacgattccctgcagcagcgtcatcgtgaccatatcaccgtttgtgatgtgtgcgacttcatgggcaagaaccccttccaccgcagcatcatccatctgctgcaataaacctgaagaaaccgcgacaagcgaacggcgcttagaaggcccggtcgcaaaagcattgacctccggggaatgataaataccgacttcaggcattttcgtcatccctgcggcacgggacaatctgtgcacacggtcaaccaattgctgttcttcatagctgagcgactgtttcttcggatttaacacccggacgcccatcatcgttttggccatccatctggacattccgagagaaataaaagaaccgacaaaaccgacgacaagactgaacacgagcaatgccatcagatcaatgcgcccattttgtatatacgagccgacaccggtaacgcttgtaataatcgtaagcacaattccgattgtcgtaatgaccaaaaggttcgttaaaataaacagaaatattcttttcgccataattacctccgtcttttttaagatcaaaagaacttatttacttaaattataaatgatctgtttgaaaatgcaacaatttcgacgtatgatgttaatgtaattctcattgatattagaaagtaacacgtaatcaatcagaggtgaaccatgaacacgtttaaactgacccgaactgatatggtccggcttctttacgcgttaaaaggccaaggagacgcaacccctctccaaatcttattgcaatcagcggatatgaccttggatgaagcggaaagccgtctgcatattcctgaatttctgacgagattcgaacgaaaaaaagagaaaaaggaatacgggctttcaactaacgagattgtcgagctgggaaatctgtgcgaactgacgtctttaaaatcaaccgccgtccaaaactgggtgaagcgcgatattaaagatttaatcggccaccccttactcggcaaaaaatatacaattgaacaagctgtcatccttctcattgtacgtgatttaaaatcaatttatgacttcgaacatatacgcggcatattaaaaatcgcttttaacacgatcacagacagatcagatgacgtcatcagcccgatcagctactatgaaagctgcgcccaagtgattgattatcttcatcataaggcaaacccgccgatgaaggaaacgagcctgcaggagctcgtcgaagagcagacggacaagctcaaaggctgctttaaagaactcggaagcggacaatggaacgatatcagatccataatcgccgtcacggtgctctccgttttgactttccatattcaagcctcagcctacaaaatgatcagccatttattataattcataacgcttcttcgccccggtgtctgcgccggggtttttttgctgtacaacaattgccagcataatcaataccgttccgtttgaaactaaaatgcgaaaacacatcttgccagagaaaaggagatgaaaaagatggcgagcagaaataaactcttagttccaggggctgagcaggcacttgaccaatttaaatacgaagtggctcaagaattcggcgtgaaccttagctctgatacagcagcacgcgcaaacggctctgtaggcggggaaatgacaaaacgtcttgtacagcaggctcaatcacaattaaacgggaaaaatcaataatgcagcttattcgccgggacttctcggcgaattttgatatttatcggcattctcctttccgtgccggtagccgttcggattccttcggtctgacgaatcttcatgatgccgataggattcccaatgttcattgcgatcatgattccagtaatgattgtaatacttttgcttaggctctttgtcatttccgttttcctgagggttttgtgttgggggctgctctgtttccccatcttgttccttctgtgtgttttcctctgatccggaagctgcatttttttcggtttgctgattgccgtcctgactgtccggcttcgcttcttccgtaccgggcgttgtttcattgtttcccggcttctctgctgccttttcttcatcaggagctgtcttttcatcagccgccggcttgtctgtgtccggctgctcgctttgatcagcgtctgtttcggtatctttttgatctgtttcattgccgtcggtttgcttttcaggctgtttttcttctattttcttttcgtttcttcttatgtagctgcctgttgacatcccttcctgttttgctttttctcttgtttccatatcagattcaagcgattggacctggtaggtgcccttatatttttcagtcatgtcagccagctgttttttaacgccttttttatatgtattgtcatctgtattttcataaaccgtggaaattaaaatctcttttgattcctttacatatccgtgcttgctgcaatcggtaataatattactgatgacttccttaaaatcgctgcttttccaatctccgatgtcactgatgacctgtttggcgtcatggttcagcggtgtcagttcaatgacttcatatttgctgtttaaagccatttcaatgctgggattaatgtcaagcgtcatatacgcgtaagctttgttatcagaaaaaaccgggagcaaaattaaaataaacaaaataatagcagtcatcgtaaacactcccaatttaaaagggcgcagtttcagaaaatcaaaaaagctggcccttcttcccatacgcgtttcgccttcgaacgtaatttcctctccgatttcacaagtgcggtgatcattttttgtttttaaaaattgtccgtcaggggttagcaacgtgacgaattttttatttttctctactatgatccctcttctcatgagtgcaacacccctttaagataatcttttaaataaatataatcaccggtaataataatactcatggcgatgatatattttctgttccgttcgatcgtttttctgctgaccgacacgagctgctccagctgtttgacaggaagctgttttttatggtgcaaaatggacgccagctcttcattttcaacaagcgtgtaggctaccttaatcgcattctgcctcgcatctgtatgcttcggcgattgttccagcagctctttaaaagacaggccgtattctttcagctgcttctgaaaaaaaagaatttcttcccggcgctgttcctgttctatctgtttgcggtattcatcaatggaaagctccgcttcgataaggctctgcgaagattcctggtcgtcgccttcctgcacatccatattgatatgctgagcggttcttgcttcttttctgatatagtctatcacttttctttttataatcagctctgcaaatgcaagcagcgaattacctttttcagccgaatatttttcaatggcttcgttaaacgcgatcagcccgatgctgaattcgtcgtctttttcatctatatatcgtttacaaacggatgaaaccgtcttcgcgataaaaggcttatattgctgtattaaatcgttctgcagatctttgtcgcctttttgtattttttcaacagatgtttcaagcgtttgcttcttttttcccaatttaaacaaaaggctaagcactggtttcacctcagttcctccctataactactcataatcatagctaatttagtagggattcgcaaaggaagaaaaagagaaatcgatttcatttgtctcaattatgacaagccaataagacgtactatacatgatttcgtgcccccatgcagaattaagggggttttctctgtgttttttgtaacaatgctgttataaaattgttatcatatgtcttaaatgtaagcgtttcaaacaaaaaagggaacctgctttttaaaaagccagactccctttttgatcattttacgcgtgttctcttttttccgattccgcgccagactctatttgttttgctcctgacataaaccatccgcaaatcgcaatggcagccagaaccgcccagaaaatgattttccaggccgccgaatggatgacatctgccggaattataccgagttcctcatgggccaatgtataaagagcgagcttcacgcctacccatccgacaatcacaaatgccgtcgtttcaaggcccggtctggttttcagtaaggatacgaacattgatgccgcaaaacgcataatgattaaaccgattacaccgccggctaaaataactagaaactgaccgccgtccaagccgccgatggcaggaagctgtgttcccgggagcgttacggcaagcgcgaccgccgctaaaatggagtcaacggcaaaagcgatgtccgctagctccactttcaagacagtctgccaaaacccgctttctttctgcgttttctgaccgttgttatctttaaatacataccgcttcagcaaatggctgaccgcaatgtaaaacagatataaagcgccgacggcctggacctgccaaacattcaccagaaaagaaatggcgaacagcgacccgaaacgcaaaataaatgcgcccgccaatccgtaaaataaagccttcttcctttgtttttcaggaagatgcttcaccatcacagccatcaccagcgcgttatccgccgccaaaatcccttccagcccgattaaaacgagaagaacccatccatactccaataataatgcaaagtccaatccattccctccgtttcttttttctatcatccgagcttataccggcggtttttttacgcaaaaaagacctttgccgatataaggcaaaggtcttgctagacatgaatgattggcatgccaacaaagccgatggatatgatccatgaattgacgactttgtttccggaatatccggacgctactcccctttgggatttcaagaaatatttgtttatacgctcatgataaagcctgtttcatcatttgtcaacgcttaacttttttaacaaattgagaaattttttctgttttggcccgctgttttcttctctttaaaaacatccaaagaatgagaagcaacacaatgaatataccgagcggcagcatatattgatcgaggatggaaccgacgcttttccaattttccccgagtttcattccgaggtatacgtaagcaaatgtaatcggcagcatcgctgcatatgtatatagagagaacacccagacattcatcttcgcaatgccgcacggtaaagaaatcagcgtcctcacccccggtataaaacggccgctgaacgcgaccaaacctccgtgcttctgaaagaaatcatctgatttctgcagggattcgggttttatccatatatactttccatatttcagcaaaaacggccgaccgcccagcctgccgattccatataagacaagcggacctgaaacaccgccgagcgaaccggcaaacacggtcccggcaagcgtcatatccccttttgagacccaatagcccgcaagcggaagaacaatttccgccgggatgaattctatactgagcgccaaaaaaatcccggcgtaagataagcttttaaacgcttcaattattgatatgatgaaatcttcgatgatttatcactcccggcttacgtctatattctgaaacttaagaatgattttaacacaaaaccttgagtctgaaatatcttttagacatgcccgttataaatgtgagtcgtttcagatcggtatagcgggagggaatgacatgcgcaatacaacgtcccgcctgtctcctgattgcttgtctggcggcggttatatcacttaagttctccggaaaaatttacccttcgcggtaagcggcggctgaccgcggattcagttcatatgggagcgggaaattttctcagtcactacatgggaatgcggggcatttcccggggaatgattttctgggacttcagcgctttaaagaacttaccgattcactgattgtaaatcaagaattcatttgcttttcagccgaccatttccgcctgaggaaatggaacagccgctccatgaagcgccgcatcacccataagttgctacacatggaacggacccgtttatccacaataaaagacaaaaaggagtttttattcatgcacacgatgtggaagggttcgatcagtttcggcctcgtcaatatcccagtcaagctctttgcggccactgaagataaagatataaaattccgcagtcttcataaagaagaccatgcgccgattaaatacgaaaaaatctgcaccggatgtgaaaagagtctggaacctgatgaaattgtgaaaggctatgagtatgtaaaagggaaatacgtcattatgacagacgaagacttgaaagacgtaaaacaggaacatgaagaaaaagcggttgagattgttgactttgtccagctgcaggaaattgatccgatttattttaaccggtcgtactatgtcgggccgggagataacggcacaaaagcctatacacttctgcgggaagcgctgaggacgacgggtaaaatcgggattgcctccattacgatccgctctaaacagcagcttgcgattcttcgcgtgtatgacaactgcatcgtgatggaatccattcattatccggatgaagtcagaaatgccggacatgtgccgggcgttcccgagcagacagccgttaatgaaaaagagctgcagacggcgattacgttaattaatgagctgacaaccgagtttgacccggaacaatacgaagacacataccggaaagcccttctcgctaaaattaacgataagctcgaacatgaagaagcgggcgtgacaccggctgctgccggcccgcgcgaagatgtcatcgatcttgtcagcgcgcttcaggcaagcattgaccggacgaagcggccggatcgcgaacaggctgcaccggcgcggacaaaagacgccgcgtcagcaggcggcggaggcaaaaagcagaagacgaccagacaaaaagccggaacgtcttaatcatggtgctgacgatgcagccgattttgacctctgtaccgcctgaaggcagtgagtggcgctatgaggtaaagtatgacggattccgctgtcttctccgcatagacgaaagcggcgttacattaaccagcagaaacggacagacgctgacgaatcaatttccggaaatcacggcttttgcggccctgtgttttcagcacatgaaagacaggttccccattacgcttgacggagagcttgtctatttaatcaatccgtacagagcggactttgagcatcttcaaatccgcggacgtttaaaacggacggaagcaattgaaagcaccgctgatagacggccgtgccgctttctggcatttgatctcctcgttctggaaggcgccggcaccgtctcattaccgtatgtgaaacggaaacgcgccctttccaaactgcttaacgaagcaaatcttcccgcctgccctcatcacttagcggaagaagcgattcaatacattccggaacacactgactttgatgcactttgggacaaggtcgtccgccatgacggagaaggtatcgtagcaaaaagggcttccagcggctgggcggaaaataaacgctctcccgactggcagaagtataaacatatgaaaacggcacatgtgctattaaccgggtttaacccgaagaacgggtatgtaacggcctctgttttaaaagacggcaccgccgtcccgatcgcttccgtttcccacggcatgcaggcggaagaaaaaaacgccgtcagaaccattatggagacccacggaaaaaaacaaaaaagcggcgagtatacacttgagccttctatctgcatgaccgtgcagtatttaaccatattgcaggacacgctgcgtgaagtatcttttgtgtcttttcagtttgaaatggattggacggaatgcacgtatcagcagcttatccttcactctaaaacgctgccgccgaagctgcagttcacaagcctggataagattgtttttaaaaaacgtgaaaaaacgaaagcagatttccttagttatatggtgaaaatgagcgattttcttatgccctttcttaaagatcgggccgtcacggtgatccgttatccgcacggcgcgcccggcgaatctttttttcaaaaaaacaaaccggactacacgccggactttgtctcaagcgtgtttgacgggagccacgagcacatcgtatgcagcagcataccgtcacttttatggctggctaatcagctggcgcttgaatttcacgttccgtttcagacagttcattctgaaaggcccgcagaaatcgtcattgatcttgatcctccgtcaaggaatgattttcccatggcagtggaggctgcacatgtgctgaaacagctgtttgactcattcagcattacgtcattcccgaagctttccggaaataagggcatccagctttacatcccgctttcaccggaagcattcacctatgaagaaacccgtgcgttcacaatgctcatcgccgattattgcgtcaggacgcagccggatctttttacgacagagcggtttatcaaaaaccgaaacggcaggctttacctagattatttgcagcatgccgaagggaaaaccattatcgccccctattcgacccggggcaacgaattgggaacggttgcggctcccctttattggagcgaagtcaactcctctttaacacctgatgattatacgatcgatacagtagtgaaccgcgtaaggacagagggagatccgttttatgatttttaccggaatccgcaggacggcccgctttcaatcgtgcttgagcaaatcaagagaaagagctgacgctttttgtcagctcttttcagtctgatatgtgcacatcaatttttctttggaaataaataaatagcaggagtaaggaatgtttttgagggtgagctgttttgcagtaaagtataaaatgggaatatgggccgctttcttaaacagcctgtagcagccgctggacggttttatcacatcaaaaccgagtctcgcagctcctttatgaagcattgtaatgccgacgactcctttaatctcgtctttccgtttatgctggttaatataatccgctaaatgaggcatggattgatataccttctgatatagcataatcccccttctgaccgcgctttcaataggctgcagctctttcaggagtttgacattatgaagatgaatcttaactaacacgtcgttttttttaattctggttccgtcgctcaggatgacttcttttcctttatatctagtcaaacggacgcggaatacattcgattgccgtttatcaatcagcgtcagccgggtaaagaagaaataaagcggatcaagtaagtaccatatagacagcagacagcttctcacatgttcaccttctttatattcaaagcaccctcatattttggcatggggcatgtcacattatgattggtaaataatgatgccgacctgtatcagcttatgcaaaaaccgcttcaggctctactgtccggaacagaaaaaaaacactcttcgtgaagaagagtgtctgtatccgctttcttttaacggaaaagcaaatgctggctgtgaattcccgcttttttcagtagggctatcagctgttcctgttcctcaggcataagtcctgaaaacgctctcgcaattctcaatgaatgaatcggataaattttatccaaatactcgtttcctttatcagttaaatgggcgtaaacagaacgtttgtccttcgggtcttgttctctgaccaaaaacccgtttctttcaagcttgtcgatgacataggtgacattcccgctgacaagcaaaagacgcgacccgatttgctgaagcttttgcggtcctctcgtatagagcagctccaaaacggcaaattcagtcggattaaaaccgtgttctttactgtctcggatgctgtgttcagacacactcttgaaagcccttgcaaaaactttgtacaaattcatcgaacgcatcacttcttcttcgttaaatgataatctcatcatatctaccccgtatttaagatttttataaaaaaataatgtaaacccttacaattcataagagtcgttctttgttttatattctattcgtgccgtttttcagaattccttcttttttatataaaaaaatacccttatacatcatttaatttgtataagggttccgttctttatagggaatgttccgaaaaaaatacgcgtattcctttctcagctccgtaattgtcatggaattgagtatttctttcgtatagactccgatctgcagaagctttttggaataatggtttctctctttgtccaatgcattttgaagcaaacgactcatggcggcctcctttgttttccgttattctatgatcagaataacgcttttatatcaaagacgtataaagccattgtaaaacttctgtagattatgatgtttttcggtaaagtccgttctggacggctctgagcagcggaaaagcgtgttccccggcaagctgcatgaacgcctccagcatttcatcgcgtttcatatctaattcaatgatttcttttgccagcgaaaccgctttttctttctccattcctatccttcctcctcattgtgtctgtacagtaagcataaaacggggcacaggaccatgcattaaccttgtcaatttttctgccgctttttttcaaaaattttctatttcgcgtcagaaaacctgacaagcgtcaggttttttctctttttttcttatataatatgagtaaaagacatccaggggtggggaaaatgacggcagacgaacaatcttacaaagataaaaaagtaatctcgatcggcattgtaagcgaattaaccggattgtcagtcagacagatcagatactatgaagaacggaaattaatctacccgcagcgttcatcacggggaacgagaaagtattccttcgcggacgttgagcggctgatggatattgccaacaagcgggaagacggcgtgcagacggctgagattttaaaagacatgcgaaaaaaagaacaggctctcaaaaacgacccgcagctccgcaaaaaaatgctggaaggacagcttaatgctcattttaagtataaaaaccgctgataaaaaaagtccgcctcctgtgagacggactttttttataaagcatgaagaaatgcagttgcaatgccgaaataaattaataaggacaaaatatcgttcagcgtcgtaatcagcggtcctgatgcaatcgccgggtcaatgttcagtttatgaagaataatagggacgatcgttccggccatcgtaccgataatcaacgttgcaagcagcgatgaaccgacgacaaaaccgagcgttaagtctttctgccagacggttgcgacaatcgtaatcgcgatcgcacagacgatgccgatatagataccggttcttagttcacggaaaatcagtttaaagatggtttttttattcatttcttctttagccagtcctctgatgacgacggcgagtgactgtgtgcctgtattacccgtcgttcccgcgatcatcggcatgaaaaacgcgagggcgacgactttttgcaatgtatcttcaaaataattcagaatgcttccggaaatcaatccgataaacaaaagcagaatgagccacggcaaacggcggtacgccgcaacgtacgctttcgtatcaaatgtaatcgccttaccggaggctgcgaatttttcgtaatcttcatcggcttctttaatcacgacgtcaataatatcatcgacagtgacaataccgacaagcacatgattttcttccacgatgggaatggctaaaaagtcataccgctggatcagccgggcgacttcttcctggtcttggagcaccccggccgagatgacacgcgtaaacatgagatcctgcactttatcctcaggctcgccgagaattaaatctctgtatgagagcactccgacaagctgcttgctgtcattaatcacgtacaaataatttattgattctgcgatttccgcaaagcttttcagcttcacgaccgcatcttttactgtataatgctgcggaatccagacgaagcggttcgtcatcatccggcccgccgactcttgcggatagttcatcaaaagctgtacggcctttgattcctcagcctccatgctggataaaagctgttctttcagttcttcatccatctcttccagcaatgcggcgagatcgtcgttatccattttattcattgcgagagtggctttcgttttaccgactttatgcaaaacggcaagctgaaattcccgctccagctctccgatcatatcggtgatgtcatcaaccgtcatatatgacagatagcgggcccggtgcttttccggcatttctttaaacaaaaatgccatgtcatagggttgaagctcatctatcatgtttcggaattcttttatttttccgtcccgcaataaaatgataatgcgtaatatgagttcgtcataggtcatgttttggaccatcgggactcgtacctcctttacggagacgcgccgtccgtcaagggaagtgcggcggtttgtctcctcatcatgtcgtcactggttatctggctgtatatgggtacttcttctgacatactcgaatggggagaatccatactccgcacctccttatcatgctcagtcgtgtacgttttgaggcataaaaaaaaccttctgatatgaaggcgaaaacaagcacggcaaataaacgtgcggggcctccaatcgtagagctttagcactgtatggcataggacagccatccagctgcgttaagaatcaccttatgtcgatgattcctgttgacccattggcgtctttggacatttttgggcagcagcgtatctccatacaggagcctcacctaacgaagttcttatttgaattgacacactgagattacagaaaaaaaaggaatgtgtcaaccttaaatttgtgatttcagcacatgcctataaataaacggaataaaggcatagaacccttattccggcaaatcgctttcatcctcttctgaaaggaaatgataggattcatgcagcatgagggcgtactccccttcttttgtcggatgcggtacatactcagcctcgttgatatactgctcttcccttttcttcatatgacagacctcctgttcaattttagattgtccaaaagaagacccgttatcataggaaaaaaatcacttacggagcgggacatgcagctatatttttcggatcgtgaaaaagttcctaagcagccacgggcccggtttgaaaccgagcgttaattgccacgcgccgatcgcctgcagtccgaactcccgaacgagaaccattttttcactcatgcttcgcacatcctcaaaccacacttcatgcgttcttccattttcatcagtataccggaagtaaggggaacgctcctgctgagaataacggatcactgattgatgcttcatggccgtttccatggcgcgctgattggagatggcggatccgatcgttcccggacggtacggaatcacccaatcatacccgtacagcggaacaccgagaatcacttttcttctcggcaccctgctgatagcaaaattgatcgtttgcctgacctctgtcaaaggcgccacgggtcccggctcactgccggcgtggtgccagtcgtacgccataatgaacatataatcgacgacagctccgattccgccgtaatcatatcccctcagccacggcactgcatcacttgttttcgccggaaccgatatcgttaacgcgaggtgatgctctgaaagccgggtttttaactgccggagaaatcctgtgaagaggtccctgtcagcttctctgacccgttcaaaatcgatatttacaccgccgtatccctttcttacggttaaggagacgatattgttgacgagattcgttcttgccgtcggattttgcagcacttgatgggctaattccggactgaatcccccttctgtcagattcgtaatgacggcaagcgggcgcactctgttctgccatgtggtttctattgcggttctgtcgtttaaatcgttaatgatatctccgttcgggccaaaatgatattcaaacaaagaaatcgccgaagaatacggcgcaaaatcattaattaactctctatccgcttcaggcgtccgaatgacataaaattgcagggtccccgcaagatagttagagatatcagggatcttcactttcatacccgcccgcagccggtttggcggaatatccgggtttgcctgcatcagctgcatctgcggcacataagccttacctgcgataacggcatacgtatcattcggctgaaccgtatattcattaagagggattaaaagcgcctgccccggaacgatattcgtttcctcaagcccgttgacgcttctgatgctgtcaacagggtatccgtactttctgctgatggaaaataacgagtcgccagactgcactgtatgaacaaacatagatgtcctccgtttccttttgatcaaaagggctcttcttatctttatgaatgatcttccggtccgattccaaactctgttcggagaaaggctgtttacaaatcagacatgatcaactatgatgatgtcatcataaaaaactgtataggaaacgcactaggggtgctgttatcggctgagataaaacatgcggcaggcgtgttttgatcccttataacccgatctggataataccagcgtggggaagtgcagattgaccggagcgcagggtttttccccatgcgttttcgttctgctgctgcatattccctcggatatgcagttttttatttttcattaaaaaacgggggaggacaccgcaatatgaaactgaatatgaaccgcctgtaaaatcaactctttcatacatacgactatccgataagaaagcaggagatcacaatgaaaaattggaaaatgagagaaattgttgtcatgtcagtcatcagtgttgtatttgctgtcatttatttagtatcaactcatgcaagcaatatagcggcaggatttttcggccggatgagctacgaaccgatttacggtatctggtttatcgtctcggtaattgccgcgtacattattcaaaaaccgggagcggctctcgtttctgaaatcatcgccgcgtttgtggagtgcttactcggaaatccgtcaggaccgatggtgattctgatcgggatcgcacagggaatcggtgcggaagcggtctttttagcgacacgctggcggatttataccctgcccgtgcttcttttatccggtatggggtcttctgtgacgagcttcatttatgacttgttcgtttccggatactctgttttgaatccgggtttattagccgtcatgcttctcatccgtctgatctcaggtgcgcttcttgccggccttctcggcaaagcaatcagtgatgcgctggcttacacaggggtgctgaacggcatggcgctcggaaaacaattcaagaagaaaaagaaacaggtgaaccaagatgcaggcatctgagccccttctatcggccggccgtcttaccttttcttatgatcaggatgaaaagccgattcttcaaaacgtgtcctttcagctccgcaaaggagagcgggctttattgctcgggccgagcggatgcggcaaaagctcgctcgctctctgtttaaacggtctgtacccggaagcatgcgatggggttcaatcgggaaccgtttctttatacggaacacctctttcacatctgacagaacccgccgccagatccatcggcgtcgtgtttcaagatccggaccagcagttttgcatgctgacggttgaagatgaaatcgccttcggcctggaaaatttgcaatatacaaaagaagatatggacgtaatcatcgatgacgttttagaaaaattagagatcactcatctgaaaacgcgaacgatcgcttcgctgtcaggcggttcaaaacaaaaagtggcgcttgcctgtatcattgcgatggaaccggaactcattattttggacgaaccgacggcacagcttgatccatattccgcacgtgaattagtgcggctgatcaaagatcttcaagcaaaaaaaggcttcggccttctcgttatcgaacatcagcttgatcattgggcgccgtggatggacaggacgattgtccttgacgaaacgggtcagaaggtgatggacggagagacggacgttatctttgaaacaaagattgaagagctgatagagctcgggattccgaatccgcgtgtgatctcattgcaggagcacgtcagcattccttttacattgtgtaaagaaaagctgtttcacgaacctgtaccatctctgcccgaaccccggcgcgccgagctttcggcagaagacgcgctgagcgttcacgagctgtcattctcaagaggagcagacatcatttttcaggatgtgagcttttccgtaaaaaaaggttcaatcaccgcgattgccggccctaacggaacaggaaaatccacgctcctttctgccgcggccaagctcatccgtccgctgggcggagacatcaaaatagacggcagaccgattgattcctattctgaaaaagagctgcggcggctgatcggatatgttttccaaaatcctgaacaccagtttgtcacagattccgtcattcaagagctgatgttcggttttgaaagcagcagagccgcaaaggagaaagctcttcagctgttaacccgattcggcctgagacgccatgcctcacagcatccgttttctttaagccaaggacaaaaacgcaggctcagcgtcgcgacgatgcttatgcacaatgtgaacgttttgatgcttgatgaaccgactttcggacaggatgccaaaacggcgcgggagtgtatgcaaatgctccgtgagattcaaaaggaaggaacggctgttttaatggtgacacacgatatggaactcgtctcagattatgccgacacgatccttgtgctctgcggcacgaaactggtattccggggaactcccgacgctttgttttctgataacatcgggatcgccgagcaggcgcatttggctttgccgctgcggtatgaatggatgaaacacgacaggaggcggagaaatgaacttgcggctggaggctgttaacccgtcaataaaggcggcggctgtattgttatgcgtcattatgctgtcgtttatttataatccgtacacccctgctttgttttatatcatcattgcgggaggcgtcctctcggcggggcgtgtgccgctgaaaaaatggctgctgttcacgattccgtttgtcattctggccttcggttctttatggacagccgccgtattcggaaacatcccgacaaccggaagcaacctgctgtttaagctcgggccgattgccgtcaacagtgataacgcggcgctcgggatttctatcgcgtttcgtattttatgtttttccgctttgtcgatgatgtttcttttcacaaccgatccgattctgttcatgctcagtctgattcagcagtgtaagctgccgccaaagcttgcatacggcgttatcgcggggttccggtttctccctcttctgaaagatgaaatcctgatcatccggcaggcgcacagaatcaggggcgcggcgtctgattccgggctgaaaggaaagcgctccgccgtcaggcgcttcaccattccgctattggcaggcgcaatcagaaaggcggaacgcacggcgatcgcgatggaatctaaaggctttacggggagccgaaaccgcacgttttacagaactgttactgtgcgccgcgccgactggtgctttttcctgctcgtgcttctgttattcggcgcaagctggctcatttcattgttgtttgtataaaaacaggccgccggagtgattcggcagcctgttttgttatgtatgttattgatgataattgagagcctgagcgagattggacttgatcgtaatatctgagaaattaatgccgagctgtacggcggtttgagccatttccggcctgattccggataaagtggacgtgacgccgatcaggttcaacgcctcaattaatttaaaaatctgatgcgccaccatcgtatcgacaactactacacccgacaggtcaataaacagatgttcaatcagccgtttggcacatgtgctcagcgtattttcaagaatgaatttggcgcgctccgtgtcaatatcgccgacaagcggcagcagcgccgtccgtttgctcagcgtgataaccggcgagcttaactccaaaatcatttctctttgcgcgttcagctgcatttttgagttatgctcggcatgatcgacaaacgtgtaaatcgtaaaatcaaatacttgtacaattaaattctcccatttcttcctttctccctgtgcaaacgaagattcatgtttatcggcaaacgcatcataataactgatgtatagtctccggtttctcatgaattcacggaccacatactggacgggtgtatccagatgcttctggtctttcgcgagctcaatcacccactgctcgaactcttctaaaaattctttttgcggcataatatacattttattaatatgccggtaaaattctttatcctgctccgtcagttcttctgtgatgacaggatttgtcaaagaataaatcgaattcggatccgaatcttccatcgtttcgatccactctttcgcaatttgatccacttgttctgaaaaatagttgtataatgcttcacttatcttcatatctcttctcctttcccatttccaattatagcgtcagcgggtcatgaatgaaaatgaaagctgtcaaactatccatatatttgaaattttttagtgcgatagattacgccttttttatgaaaatgcttcaaatgactctttccggccggcatgctctgccataaaatagtagcaacacccttgtatccactcgcaagcataaaaaaggagggcttttttatgaatggtgaaatgcatttgattccttatgtcacggatgaacagatcatggatgtgaacgagcttcctgaggggattaaagtgattaaggcgccagagttgtgggcaaaagggtttaaaggcaaggatattaaaatcgcggtgcttgacacaggctgcgacatcaatcatcctgatttgaaagaccggattgtcggcgggaaaaacttcaccgatgatgacggaggcaaagaagacgcgatttccgattataacggacacgggacacacgtttccggaacgattgccgccaatgattcaaacggcggaatttcgggtgtcgcgccggaagcaagccttttaatcgttaaagttctcggcgggcaaaacggcagcggcaaatacgaatggatcattaacggcatcaactacgccgttgaacaaaaggccgatatcatttccatgtcactcggcgggccaagcgatgtgcctgaattgaaagaagccgtcacaaatgcggtaaaaagcggtgttctggtcgtttgcgcggcaggaaacgaaggcgacggagacgagcgtacagaggaactgtcgtatccggccgcttacaacgaagtgatcgcagtcggatcagtctcaatcgcccgtaaatcgtctgaattttcaaacgcaaacaaagaaattgacctggtggctccgggagaaaatattctctccacccttcccaaccataaatacgggaagctgacgggcacttcaatggccgccccgcatgtgagcggagcgcttgccttaataaaagggcttgaacaggacgcgtttcagcggacgctttctgaggctgaagtctacgcccagctcgtgcggcggacccttcctttggacatctccaaaacattggccgggaatggatttctgtatttagacgcgcctgaagtgctgatggaaagagccgaacaggcacagctgctgtctttctgatatttttctcgtataatgattaatcagcttgtcacatcaccaatttttaaattgtgagattttctattgacagtgatctgaataagctgataagataaccaacaaatgatgtaacttttcaaaaaaattgaaatattttctcttatcgagagttgggcgagggattggccttttgaccccaacagcaaccgaccgtaattccattgtgaaatggggcgcgtgatttttgcgccgagacgattgtctcataaggcacggtgctaattccatcagacgtgatctgagagataagagaggcttgcattttgaagttaaagcctctttctctcatgagaaagaggcttttttgttacatctcacttaaaggaggatatttaatgacaacaatcaaaacttcgaacctcggttttccgagaatcggcttgaacagagaatggaaaaaagcgcttgaggcttattggaaaggtaacactgataaagaaacgtttcttaaagagcttgacggtttattcttatcagctgtcaaaacacagcttgaccaacatatcgatatcgtgcctgtctctgatttcacccattatgaccatgtgcttgatacagccgtcagctttaactggattccggaaagattccgcagcatcacggatcccgttgatacatactttgcgattgcccgcggtgtaaaagacgccgtttccagtgaaatgacgaaatggttcaataccaactaccattacatcgttcctgaatatgacgaaagcattgaattccgtctgacgagaaacaaacagcttgacgactaccgccggatcaaagaagaattcggagcggaaacaaaacctgtcatcgtcggtccgtacacattcgtcacacttgcgaaaggatacgaagaatcagaagcgaaagcgattcaaaagcgccttgttcctctttatgtgcagctgctgaaagagcttgaagcagaaggcgtcaaatgggttcagtttgatgagcctgcccttgtgacagcttcttctgaagacgtccgcgccgccaaagacctctatgaggcgatcacaaaagagctttcaggactgaatgtcctcctgcagacatacttcgattcggttgatgcatatgaagaactcgtttcttatcctgtacagggaatcgggcttgacttcgtacatgataaaggcagaaaccttgagcagctgaaaaagcacggcttcccgaaagataaagtactggcagccggtgtggtcgacggccggaacatttggaaaatcgatgttgaagaacgccttgacgcggctttggatatcctcagccacgctgatgttgaggagttatggattcagccttcaagcagccttctgcacgtgccggtggcgaaacaccctgacgagcatcttgaaaaggatttgctgaacggcctgtcatacgctaaagaaaaactggcggaactcggcgtcttaaaagaagggcttctgtccggaaaagcggccgtcagtgagcagatcgaagaatcaaaagcggcacttaaggctttaaaagcattcgcaacaggagcgaactcagctcaaaaagaagagctgaatcagctgtcggaaaaagatttctcccgtccggcaagctttgaagaacgattggcgctgcagaatgaatcactcggtctcccccttctgccgacgacgacaatcggaagcttccctcaatctgccgaggtgcggagcgcacggcaaaaatggcggaaaaaagattggacggatgaacagtaccaagcctttattaatgcggaaacgaagcgctgggttgacattcaggaagaaatcggcttagacgtgctcgttcacggagaatttgagcgtacggacatggtcgaatacttcggtgaaaaacttgccggattcgcctttacgaaatatgcatgggtgcagtcttacggttcacgctgcgtacgtccgcctgtcattttcggagatgtcgaatttatcgaaccgatgacggtaaaagatacggtctacgcccaatcgctgacggaaaaacacatgaaaggcatgctgacgggacctgtcaccatcttaaactggtcattcccgcgtgtggatatttcaagaaaagaaatcgccttccagatcgggcttgccctcagaaaagaagtaaaagcgcttgaagatgccggtattcagattatccaagtggatgaacccgcgctccgcgaaggactgccgttaaaaacgcaggattgggatgaatatttaacttgggccgcagaagcattccggttaacgacgtcttctgtgcaaaatgagacgcagattcatacgcatatgtgttacagcaactttgaagatatcgtagatacgatcaatgatcttgacgcggatgtcattacaatcgaacacagcagaagccacggaggatttttagaatatttgaaagaacatccttacgtaaaaggcctcggactcggtgtatacgacattcacagcccgcgtgtgccggcaactgaagaaatctatcaaattattgatgacgcgcttgaagtgtgtccgactgaccgcttctgggtaaacccggactgcggactgaaaacaagacagcaggaagaaaccgttgcggcattaaaaaatatggtcgacgccgcgaaacaggcacgaaaaaaacaagctcagcttgtataatgaaaacagccagccgcaaatcgcgggtggctgttttttcttggcgtgctacttattcttcagcgcctccgcaagttcacttagtgaatcatgctgcttaatttgatagccccgcccttctttttgcaaataccctttttggcagaattgcgtcagcacatgcaagagatgacggtaagatacacccaaataatcacagaccgttacgtgcttctctttataaatcccttcataagccgtctgcaaaataaaatcagccagccggttttcaagcgggaacgccagactttgtgaatatttcgaagccataagcgttgccttagcacttagaaacttagccaactcacgcaggaatttcgcatcctgcagcaattgcacgcgacagcggtaaataggcagagcaaaacaaacagtcttcgctgaggcttgaattccttttgtgtaatacacttcatgtaatagttccatctctccgatgtaatcatttttgttgataaaattaattaaagaaactttcccgttttgatgggttacatatattttcgcttttccttcaatcacgtaaaacaggaagtcaggcctcctgccctcttgaataatccattcgtcccgctcatattcgcgcacttccataaactcttcagcggggaaagagaataaatgcgcgattgagtgtttttttaactgatgccgctttttctcgcctttataaatttccatcgtccaccccaaaaatatgagatatctcatattgtctttatgtctttacatgataacatgccaattaaaggaggaacgggaatgaaagcatatcgctggatgagtctgcatttttttagtttttttatgacatggggtgtttttctgccctattggacgggatggatggtgcatataaaaggggtttccgtatccgaagccagtttcattatgagcctgggcttggcggcaagagggatttccacattatttttcttcccttatttatcaggaaaattcagcagcaaagccttattaaacggcgccagaatcgggacgcttctcgcacttttatgttatattcccgctgattcttttcaaagcctgcttcttgtcacattagtgctgcatgtgttttaccctgctttaatgcctgctttagacagcgcttgcggcgtccttgtacagcataacgaattaaaggcttatgggacaagccgccagtgggggtccgcgggttttgtttcagccggcgtcatcctgtccgtctttacaggtatattcggagatcaagcgattttatgggcactgcttttgggcaccctgatattcgcatgtctcagctttatgcatgcgccagctgttctttcaaaacggccggaaacagaccgcgcaagaaaagagggtatgtttgccttattccgcatcaaatatttcggtctggtgctcgcaatcgttatcttactgcaggcggcacatgcatcttactacaattacggttatctctttttgcaagaaatcgatgcgcccgcatatgccatcggaatcatcatcaacatcgccgttatcgcggagattatcttctttgcaatcgctgaccgatactttcatcaatttacggcaggctctttgctcgccctggcggcgcttggtgctaccgtacgctggatactcgtatttgcctttccgcatgtcatcattttctgtattgcgcagacgctgcatgcctgttcattcgcgatgggacactatgcatttatgaaatacttaattaaaaatatttcacccgcgcaaatcccgaaagcccaaggcatatattcagcgcttgctctcagctggagcactgcggtatttactattttcggaggttttttatatgaaattgaaccccggtatgcctttatcggaatggttgtttgtacgatcccctccatgcttctcgcccttttatacagaaaacttgaaatgaaaaagagagtttttgcaggaaacgctcaagatatgtagccatcgctttatagacgatcacatgacccgctgtcattttgaccgatttgcgaatgctgtgcgatgtattttctctatatttaaagtatttccttcatatatgatgaaatcaaaaacagcggtatagcccgctcaattggttaataaagggaatcagaaacttggacagaatccgtgaatataatgatacagtactgcttacgctcatttcggggaactttgttcgtaataaaatgattttcagccaactcataaggagggacattgtgtcacagcctaatttgcccaatatcacccctgtcgttacactttccagagacgataccatcaaccttcttctttcgtcaattgctatggaagagctgggaatggcacatattctgaatgcggaaggggaaaaaatccaatacgcgctcggaacgattcccggattaacaggacccccgtcaagtcttgctgatattcttaacctgaatgagagcgtccgggatacgcttgacagcttaatgaaacaggagcttcttctcggttcaaaattggacagtatctcaaatatccctacactggcgggaccgactggtgctacggggccgacgggaccagccggcgggcccgcaggacctacgggagcaataggaccggccggagcgacggggccaaccggaccgaccgggccgacgggggtcaccggtgcgggccttcaaggaattgttgcttttaatccgctgagcgcccccacttacacaaccggacaggttgtcttgtataacggaagctcttacgtcgcaaacgtaaacagccctgtgggaacccctggagcctcagctgactatacacttttagctgcggcgggaagcaccggcactactggcggtaccgggccgactggaatcaccggcgctactggcggtaccggaccgaccggaatcaccggcgctactggcggcaccggaccgaccggaatcaccggcgctactggcggcaccggaccgaccgggatcaccggcgttactggcggcaccggaccgaccgggatcaccggaacaagtctgacagcaacttccggctatgcgagcaatacgggcggcggtgttgtcgcagttattgccggcggcacgaccattcccttaccgaatgaacaaaacctttcggcagatattacggctaacgtcgcaaataccatatttaccgttgctccggcgggacggtactatatttcctaccatattaatttaacggccggcctgcttgtaagttcgcgtattttaatcaacggcactcctcctgcaagttcgattatcgccccggtcgcgtctttggcaaactttaataactcctttattgtgactttgccagcaggcagcaccatccagcttcagctgttcggattattgggtgcggccacattgcttggaggaagcgccggtgcagctttaaacattattcgattatcttaatggaacatgcaaaaaaaggatcaggcgtttgtccgctgatccttttttaattgagacagaagctcttgtgcgggtttaaattgaggattgaacttcaccgattttttggcgtaagcgatggccgtcatatcatggtttaatgcagcatggcatttggccatataataaaaagctctgaaatcggcagcaccttttaaaatgaagtgatcagcgttttctccttcaacctgcgttccgttttcaaatgctttgattgccgctctgtacttttccaaatgatataatacaaggcctttataataatgaagattgctgtaatcaggatatagcttgagcactttttcaatcccttgttcggcttcttcataccgtttgagctcaagcaatattgtatatttcaaataatacaggagagacggaggcattcgtttttcgcttaaaaattgaaaaattgagccgttgacaagatgtaatgctttttcatagtcttttattctgtagcattcacttgccaaatgatagacaagccacggatcaggattttcctctgaaagctcttcatttaaaatgctgatattccgtttatgtttttgcttgatcttttcttcctgctccaagtagccgtagtgataaatcacacatgggagcgcgaaaaaagcattgttttcttcctcattgggagccgagatattctcgtgaattctgccttgatacagaagacctttatgattgcggaacagtctcggctgcatgctttcaaacgcttcgttttcatcgagctgcttccccgtataattgatgattttcaaaagcccccggctcggtaatccgtcatgaagcagcgaagttaaaaagcggcccgtctcctgatcgagctcttcatccgcgtcaagcactaaaatccaatctccttcggcatgctgcagggcgtaatttctggcctttgcgaaatcattctcccatttgaaatcaaatactcttgcctgaaagcttttgcatatatcttttgtattatcttgtgatccggtgtctgcgatgacgatctcatcaacgatatcttgtacacttgataaacaacgggagatgtatctctcctcgtttttcacaatcatgcaaagagtcagtttacattcagcatttccgctcattttctcacctttcccgattttggagttgttgattgaaccaaggccgttcaggagtgccgttcatcgttatgacgacaggccgcacccatctgacggcaggttcggcagtttccgcatcccattcctgaagctgcctgacagcccgcttcgtaatgggatgcgcccggaattcgcgcgggctttcaaaaatgaattttttcgttcgttccgtaactgtcttcatttcaagaaagtgccgctcatacatctgcttctgctcttcttccaagctgatcattaaaaacagacggccgcctgtttccatctgccagcggcacaatgcggagaacagcctgatttcttctttgtaatttgaaccccttcttttatccacggtcacagataatatatgtaacagcgcaatcgtgagacaatgcatggcttcaaaagatgcctgtttcgcttttgaaatgcttggatacggcatatgcttcacccgtctctttttttatgaacgctccccgccttttttcttccaaccgcagtcctcacaatccccgcactcacagcagccaatgcggccgtaaaacaggccgtcacacggatcttccggatcactgggatcgtctggattccacgggtcatcaggatcgcccggatcactcggattacttgggtcatccggattccacgggtcatcagggtcgcccggatcactcggattacttgggtcgtccggattccacgggtcatcaggatcgcccggattactcggattgcttgggtcgtccgggtccatacaggcttcagaatcctgtaagaagataatgtcctcaagcttcgtctgcaaaaggagttgtgatttcatgacggtgcgcaggagccgttcagtgcttctattgattgatgacaattcctccaaagagggatcgccggaagcgccgagaaacatttgaatcctttccgcttccgcctgcagaatatgggatagtccgatttcttccatagccacggatgaaagaaggaggttcagggtctcacatctggagagtgtaatgtcgggggtgatgttcggtatgtttggaagagacatcgatatctccctcttttctcttggtgtcattatgcaaaagtgctatatcgtattcttattccgggagagaagagatcattactgatgttttcgttaataaaatatcccggatataaaatccgggatattcgttcgttgatttattttaattcaagtttgacgtctacatttcctcttgttgcttttgaatacggacagaactcgtgagcagcctgcacaagcttctccgccgtttctttgtcaagatcttttgtatcaatgacgagcgttacgccgattttgtaacctccgtccctctcatcttttaaaaggctgacctgtccttcaatttcagaggtcatgtcgattttttgtttttgggcggcgagctcaagcgctcccccgaagcaggcagcatatcctgccgcaaagagctgttcagggtttgtgccggtttctccgtctttttttgcattcggcatgatgatgtcaaaatccagcaccccgtcttcggatttaatatgtcctgctcgtccgccgactgcggtcgcttttgaagtaaataatgccattattatcagcctcctcattgtacttactgtatatattgcccctgctcatatttttaaacatgaggaataggaaatgggccgtttttcggctacaataagggtaacgttaacaaacaaagagttggtgaaagaagtaatggcagaaaaagattttgaacatatgaaactggagaatcagctttgttttttgctgtacgcaagctcaagggaaatgacgaagcggtacaaaccgctgcttgataagctcaacgtaacttatccccagtatttggcgctgcttttattatgggaacacgaagaactaaatgtgaaacggatgggtgagcttttgtacctggattccggaacgctgacaccgatgctgaaacggatggagcagcacggaatcatcatgagaaagcggtcggctgaagacgaacgatccgtgacgatcaggctcacagatgaagggcgggccttgcagaaaacagcggcggatatccccattgccatgctggaacagacgggacggtcaaaagaggaattaaagcagttaaagcagtcgctttatgaggttttgaatacgctgcacggcaaaaaataaggatgccccgaatgggcatccttatttttattctgctgccagaagcttcacttcaatatttcccgctgtcgcttttgaatacggacagacaccgtgcgctttttggataagggcttcaagctcctgtttatcaatgccggatgctttgacctcaagcgtaacgcctagtttatatccttggtctgcttcatctttcagcagactgacatgcgcagtgacctctgtttcaatactcagacgctcttttcttgctacgagctgaagagcgctgtcaaagcaggctgaatatcctgcggcaaacagctgttcagggtttgtagcatgctcgagcttttttgctcttggcgttcccggcatggcaacatcaagattcagcactccgtcagaagacgtgactttcccttcacgtccgccggcggctgatacggttgcagtaaataatggttttgtcatgtaaattcacctctattatattgtgtgcaatttaatattacacaatataatagagagcgtcaatctttccgcataaaaaaagcctaccctttttgaaggataagcttaaaagattatacgcggatttgtccgtttcctttgatgatgatttttgtagatgttaacgccggaagccccatcggccctcttgcgtgaagcttttgcgtgctgatgccgatttcggctccgtatccgaattcaaaaccgtccgtaaaccgggttgaagcattatgatacacggcggcggcgtcaacggcggtctggaagtaagccgcatgctcggcgttctccgtcagaatggcttctgaatggtttgtgccgtactgctgaatgtggcggaccgcctcctgtacgtcctgcaccgttttcacactgagaatcggcgccaggtactccgctccccaatcggcttcttctgcttgtttcgcttgaggttccaatctgcaaatcacctggtctcctcggagctccacccctttttctgtcagctgattcagcagctttcgcccgtgttcttcggcccatttttcatgaatcaaaagagattcaatcgcgttgcagaccgaaggacgctgtgttttggcattgatgacgacctcgcttgccatttgaggatctgctgactcatctatgtacacgtggcaattgcccgctccggtttctaaaacgggtacagttgattccctgaccacaagatcaattaaatttttaccgccgcgcgggatcaatacatccagcccgtcatttaatgtaaagagctgtttggcggtttctttgcttgtatcttctatgagctgaacggcatcaatcggaagctttgacagccccagtgcgcgtttcatcacactgacaagcgctatgttgctgtggatggcggaagaacttcctctgagcacaaccgcgtttccggttttcaggcagagtgtggccgcgtctacggtaacgttcggtctggcctcatagatcatgcccactactccgaggggcacgcggattttttcaatggataatccattctctttttgaatggtctccagcgactcaccgacgggatcttcaagaccgattagcagttccacggcgtccgcgatatcgagcaggcgtttttcatcaagagtcagcctgtcaataatgtcagttgtcagtcctctgttccgtcccgcttcaatatctttctgattctctgttaaaatcagccggcgttcatttctgagtccgtctgcaatacattggagcgcttcgtttttttcagccgtcgttttcatgaccatttcggcagccgcttcttttgccaaagccgccttttgcaatacttcactcatttgtgttccccctcgtcaaataaattcacccaatcatctctgtgaatcacttccacctgcttcgttcctgaaagctggtcgctccgcttccctttggcttctaaaatttcatcggatgagtactgcgtctgccctttgccgataatgcccccgggtcctctgacttccactacggcccctttcggaaaactgccgcagacatcggcgacgccggccgggaggagacttgacccgttatggatcatcgcctgctccgctcccccatcaatgatgatttcccctgatatcggagaatgaaacatgatccattgccgtgtattattcactgaggataggtctttatcaccgatatatgtgccgtcgccttttccgtctaaaattcccatcagtttttcccgtccggagccggttccgataaataccttcaccccgagcgacaatgcggtctgggcggcgagaagttttgacttcatgcctccggtgccgacctttgagcctgttgatccggcatacccgagcaattctggtgtgatgtcattcagatagtcgaaccgctttgcgtccgggttttcattcggattggcatcgtacagcccgttaatgtctgtgagaatcattaattggtctgcatgaatcaaaccgcttacaagcgccgacagcatgtcgttatcaccgaacgtcagctcttcaactgatgtggaatcattctcattaataatcggcacgacgccgcgctccaacagttccattacagtagcataggcatttctgtaccgctctctttttgagaaatcatttcttgttaataaaatttgtgccggcgtcagaccgtatctttttaaatggtccatatattgctgcattaaaagcgtctggccgactgcggcagctgcctgctttccttttatcgtaacgggtcgcgacggatagccgagagcggaaaaacccgctgccaccgcgcctgaggtaatgaggatcacttcatgcccgttttcttttaataaagaaatggcttccgtatgttccttgatttttgcttcatcaatacttccgttactgttggtgagcgagctgctcccgattttcacaacaattctttgttttttcatcgtttctcctccgtggcaatcaatccaaaccggctctcgtcaataaaaaaagcccattccgtcctgaaaaataaggacgaaatgggctttccgtggtaccaccttgtttgaacgcgtttttcacgcgtcccgctttcctgtaacgccaggttatcgcgcctgagttttcccctcaggactccaaggcaggttcggcaggtttcatgcggcaaaatgtttcagcgggccattttgctctctgtcacagaaagttctgcgtactgatcctcttcaacgctcaatgatttttttatattatgcaaagaaaacaggttcttgtcaagacattttcatccataaaaaacagtccgcctccccggcggaccgtcattaattaaatacgatcgttttgtttccgtgaacgatgacgcggtcttccagatgccattttacggctcttgccaacacgctccgctcaatcgttctgccaatattcttcagatcctctgcgtgatctctgtgatcgacgcgttcaatatcctgttcaataatcggcccttcgtcaaggtcgtccgtcacatagtgagaggtcgcgccgattaatttcactccgcgctcataagcccgtttatacggattagcgccgataaaggccggcagaaatgaatggtggatgttaataatccgattcggatgggcagatacaaaatcagacgtcaaaatctgcatgtagcgggcaagaacgatcacgtcaatttcatactgctcaagcagctcaagctggcacttctcaacttccgcgcggatgtctttgttagctttcatgtaatggaacggaatattcagcggttcgaccacttctttggcctcttcgtggttgctgacgacgaccgcaatttcggccatcatattgccgctttgccattcccaaatcagttcatgaaggcagtgcagctccttcgatacaaagatcgccactcgcttcagctcacttgccagagacaggctccatgtcatgccgaatgtctgggcgattgaggcgaaagcctgctgtaagtcttcttttttctcacgaatgcccttgcagtcgaattcgatcctaagaaaaaatcgtccgccttcagggtcagtcgtgtattgatttgattcaataatgtttgcgccatgttcaaacaaaaacgccgacacggccgatacaattcccggctggtcggggcagctgacgagcaggcgccctttttcctcattcccgcggcggtattctttcagccgctgtgtcatatatgaattcatctgttttaatccctcgtatcttcataattcgtaacttactaatagattatactgaagatttgataaaaatcaatttacgaaagaattttcagccctacggcagcgcataaaataagcgcaatgaaaaagatgcgcttcgcatccttctgctcgccgtagaaaagaatgccggctagtgcgccgcccgctgtgccgataccggtccagatcgcataggccgtgcccatcgcgattgtctccatcgcataagaaagcagggaaaaagaagccgcaaatccggcgataatgaaaagaatccatttgactttcttttctttttgaaattgattcattaaaatcaccccgagcatttcacaaagacccgcggctatcaggctgatccaatgcattacgccttctcctccttcgtctcaggcttatcctgtgtgaccagctttaacccgatgacgccgatcagcaaaacgccgatcagcacgattttcaccggatcggcctgttctttgaaaagcaggatttcactgagcacggtgcccgctgtcccgagtccggtaaagaccgcatataccgttcctacgggcaggctgtctgtcgccttgattaatagataaaaactgatgatgattcccgtaatcgtgccgctccacgccagtgccgaatcagcatgtttcaggccggtgacccataccacttcaaatacggccgctatgaccactaaaccccatttcatgttcttcaccctttcagtatccggacaatacaaaaaagcccggatagtcgtctctcatgagattgactctcccgggcttttttccctccgtgtgcatatgcggaaatatgtgcgcatatgtgttttctctcggaccaggccatgtatgaacatgcggaaccctagaaaacatgtctgttcgtatcatactacatttcgccgaaacgttcaacgtcagatgtgatgtcaaaaaccgtcagctgcctctcccatttggtaacggtctcaccgggcaccataccgattttttccgcgacacggacggaggcagcgttttccggatcaatcagcgccgctatacgtccgtattgctgcgtgtgaaaaccgtagtccagacaggcgttcgccgcctctgtcgcatagccgcggccccagcggcggcgggcaaacatatagccgatttccatcaaagtgtttccgtttaccgtctgcggaacgattccgcattgaccgagaaatgcgcccgtctctttatcctctgcgatccaaagactgacgccgtatcctgcggccaatcgtttgttccaggcaatccattcctttgtttcccgtctgcttttaagagaaggataatatttcatgacctctctgtcggtaaacagcctgtacaaattttcttcatcgtcatcccgcatagtccgcagacggatacgcccggttgtcaggatggtgccggaagacttatgtttcatcatgcacgccacgtctcctttccctgtaatagattatggatccggcaggaaaagtcctttctcagcataaaaaaaccgcttttttaaaaagcggtttgacgattaccaaggtttatctgttccgagcgcctcggccagggccttgctgtgttttaagcggttttttcgttctccggcgcgctgaacggccgtattgtgaagcatgacttcttcctcggtttccggcacgatccgcggaacgggtactgatttcccgtttgaatcaagcgcgacaaaggtcagaaacgacgttgccgcaagctcgcgttcgcccgtcatcagatgttctttaatgactttgacaaacacctccatagacgatgtgccgacccatgtgacgtaagattcaaggcatacggaatcctgttggccgatggggcgcaaaaaatctacagaatccattgaggccgtgactgtttcacaccgacagtggcgggccgcggaaattgaagcgatatcatcaatgtagctcatcagctttccgccaaacagcgtattgtgattattcgtatcaagcggaaaaaccctgcttgttttaacaacccttgtttctttgcaaaatcttgattctggcaacttcatattatttaaactcccctttggtgtctggtcgttttgactcattcatctgtaccctattaaacaatactttgaccgttttgtctaaaattttaaatattaagttggttagatattctctcataaatgtttcattattcatcacatccgggaataataaacgcacattgaataccgataggaggatatcacatgaacgtatccattcccaaatccacgcgaaaaccggcttgccgcagtgagtttgatgctttgcagacagtcatcttatgccggccggaacacatgaccatcaaggatattattaacggaacgcagaaacatttcaaacaagaaaatattaacatacccgttgccctcaaacagcatagtgagtttattgacattttaagatctcatcagattgaagtcgtcctgctgcctgccgatcccgcattgcctgagcaggtattcacccgggatatcggatttgtcttaggcgagacggcgtttatttcaaacatggcggcttcagtccggcagggagaagaaaaagtgtttcaagacctgcttgacaataagaaaatcccctatacgcgattgaaaaaagcgaacattgaaggcggcgacatcttgatcgcagacggcaccgtttacgccgggctgagcaagcgcacggataaagcggctgtccgggagctgtgggaggcgctgccggagatgacggttgtgccgatccctctcaaggaggatttcttacatttggactgtgtatttaatatgatctcggaaacggaagcgctatactgcaaaaatggcttgcggcagaaagaaattgatcttctctccgaacgttttgagatgatagaagtgcctgaagaagagcaattcacgctcggcccgaatatcctgtcaatcggcaatcagacaattatcagcctgccgcagcaccgtcatacgaaccgcgagctcagaaaaagaggttatacagtcattgaaaccgagttttccgaaattattaaatcaggcggttccttccgctgctgcaccttgccgcttgtcagaacatcttaaacatttacaaggcagtttccttcaagatacgttaatatagagaagacaagactctaaagggggaaaccgaatggctaagtacataggatacgcgggaacatatacaaaaggcggaagcgaaggcatttattgtttcgaacttgatacagaagcgaaaaggctcagccggccgaagctggcagcaaagctcggcaacccgacatacgtcactccgaattctgataacagcatgctgtattccattgaaaaggcagacggaaaaggcggtgtcgcagcctatcagattcatcagaactgcggggaattaacttttgtgaaccaccagctgattgaaggcccgtctccatgccacgtcagcattgatgataaacatgaatatgtgttaaccgctaattaccacagcgggaaagtgcacgcctttcccgtcaatgaggacggaagtctgcaggagccggctgccgaagccgctcatacgggaacaggtcctcatgaaagacaagagaaaccgcatacccatttcgcaggctatacacctgagcataactacattgcagccgtcgatttagggacggatacgctttatacttaccaaatgaaaaacggttcgctcacagaggtgaaaactcattctttcacaccgggttcagggccgcgccacatcgttttccatccggcggaaaaatacgcctatgtcatgacggaaatcagtaatgaagtcatcgcgcttgaatacaacccgaccttaggtgaattcagagagcttcaggtcatttccgctttgcctgaaggctttacggacaaatcgcaaggcagcgcgatccgcatatctaaagacggcagatttctttatgccgccaaccgcggacatgacagcatcgccatctataagatcaaccaatattccggtgaattgtctcttattgaatgggtgccgacagaaggcaactggccgcgtgatttcgcgtttgacccttctgagacattccttgtcgcgtcaaacgaagaaacgggaaatctggttttgtttgaacgtgatccggaaacaggcaaattgactctgcttcaatccgacattccggttccgtatccggtctgcgtgtcatttctgcatcaggtttaatcaaaaaagaaagctgactttatattgtcagctttcttttttgtataaatggcaggcgacaaaacgccccgccttcacttcttcaagctcaggcgttatcttaccgcagagctccatcgcttcaggacaccgcgtcctgaatacacagccgctcggcgggttaagggggctcggcagctcccctttcagaataatccgttcacgcttgtcctcaagaagcggatcaggaatcgggattgaggataaaagcgccttcgtataagggtgaagcggttcccggtaaagcgcagcgctttctgtaatttccatcatgcggcccaaatacatcacgccgatccggtcgctgatatgcttgaccattgataaatcgtgggcgataaataaaaatgtcagccctttctctttctgaagcctttttaaaaggttgacgacctgagcctgtaccgacacatccagcgcggaaatcggctcatccgccacgataaattcaggatgcagagagagcgctctggcaatcccgattctctgcctctgtccgccgctgaattcgtggggataccggctgccgaaatccggatggagcccgacagcttcaagcagttcatccgccatcatcagacgggctttttttgtattgtaaagattgtggatttccatcggctccataataatttcccttacggtcaggcgcggatttaacgaggcgtaagggtcttggaaaatcatctgcagcttgcggaagaagaccgaccgctgttctgccgcggcacggtgtatatccgtcccttcatatgataccgaaccggccgtcgggtcatacagacggagaataacccttccgagcgtcgatttaccgcatcccgattctccgacaagtccgaatgtttcccctcttttaatgtgaaagctgacaccgtcgactgcttttacggctttctttcttcctgcgtcaaaatgcattttcagcccgctgacttcaaggagcggagatgccgtcattttctattcccccttttcacttatacagcggcgtacggtgcataattctttttcatagacggttccttccaaagacagcacttcgattgtttttcccgttttcggggagtgcagcatccggccgtctcccagcgccaaaccgacatggtggatcgcgccttttccttcttcataggcgaaaaacaaaaggtcagccggccggatatcgtttaccgccgcgctgcatccggcttttgcttggtcctttgcatcacggggaagggtatagccgtttgctttaaatatcgaatacataaacccggaacagtcaaacccgaaaccgctcagtcctccccataaatacggaagcccgagaaacatcatgcccgtttcgatgacatcggccgcccgtccttccgtatgccggcactcgtctgcgtcagcttcatttacgaaccgttctccgagcggcgtcatcacccggaaaaagcctttctcacgtcctgatgcccgaagacgcgttaagaaacttacttccaagtccggtttgccatttgtgtgatataaaaaagctgtcggtttggtaatccatacggcgggggaagatgtatgaaagccgtcttttgaaagctggctttttttcatccaccccggatatccgcgcacatccttgtttgaaggctggccgggaacggcgacaaaagcccattccccttcctctttgagaatgatcacctcttccccgaaaagcgcttgcgtttggacaaggttgtctgtgcataattgcagccgctcttcatattccatagacgctaaccattttctgatctgcggcgggttttcgagcatcggcgcatcatacgaacggggagatgacggcagcgtccatacgttggctgccgccgctgtaacggctgctctcatcttttcgcctcctcttgtatcgacacaccggtaatgccgagacccggttcatcgggaatcgtaatctgactgccgctgtatgtgatgccgccttgaatcaaatcatctttcagcataagcggcgcatcaaaatcaaacctcgtcacattccgtttgcccgcggcaaaatgggccgcggcggtgatgccgagtttggtctcaatcatactgccgaccatgcattccacgccgcacgtttccgccatcgcattgattgtttccgcctgctttatgccgcccgctttcatcagcttaatattgattaaatcggcgcttctcgtctgcagcacgtgaaaggcctgacggggggtaaagacgctctcatccgccataatcggcgtgtctacggcatctgtaacctgcttcagcccggcgatatcgtctttatgaacaggctgctcgaccagctcaatgcccaggccggcgtcttccatctttcggatcgcagtcacggcttctttcggcgtccagccttggttggcgtccaatctcagtttgacgtttccgccgacacgtgatctgatcgcctgaatccgcgcaacatcgtccgatatgtcacctatgccgacttttatttttaaaatatgaaatcccttgttcacataacggtctgcatcccccgccatctcctcaggagaattgacgctgacggtaaaatctgtttccagtgtattccgatagccgccgagaagccggtaaagcggctgtccgtgcatttgcgcccatccgtcatatacagccatatccaccgcggcttttgcgctttgatttctttccaacagccggctgatatcatacagaacagcttccgtgccggaaaggctccggctcagcagagcgggcttcagcacatcgtggacggcgctttcaataccgtccgcgctgtcgcctgtaatgacaaccgtcggcggcgcctccccccagccagtaagaccgttgtcaaaagtgagcttcacaatgaccgattcagcattgtaaaccgtgcgtaaagcggtcttaaacggctttttcagcggcacggacatccgtcccgtttgaatatctgtaatcctcacgcctgatcactcccttccggaaacccccgattcaatcgttaccgctttagccgccgtatccataaccgcgcggactccgatcggaacggcgaagctcggtgaacaatggccgattttaaagcctttaagcgcgggcttccctgatttgacaatgtaatcattcagcacttgctctaaggtgagggacttttctttgtttttcggttcgcattggtgaaaatcacagaccaggattccggctgcgtctgacagttttccggccatctttaattgattcagcattttgtcgatttgatacggctcctcatcaatatcctcgataaacagcaatttgtctttcgtatcaatttcaaacggcgtgccgagcgtggaggtaatgagcgaaaggttgccgcctgcaagctctccctcggcccttccgcctgtcagcacctccagcggagaaatgtcctccgtataggtgaattccgtttctgtaaaaagctgatgatacgacgcttttgtcaggggatcagcatcttcaagcccgacatccgtgctcagcatcgggccgtgaaatgtgacgagccccgtattttgatgaatggcggtatgtaaaaacgtaatatcgctgtatccccagaaaattttcggattgcggcggattaagccgaaatcgatgtcggcggcaatgcggcccgtgccgaatcctccgcacgcgcatatcaccgctttgacattctgatcactaaacatgtcatggagatcatcgagacgcgcccggtcctctcccgccaaatagccgtgacgagtcttcagcgcccggccgagtttcacatgaaggccaagctcattctctaaaaacagcagcgcggtttgcagcgtcccgctctcaggcgggcttgcgggcgcaatcacaccgaccgtgtcgcctttttgcagtgctttcggtttatggttcatgactttttcaatctcctttccggattgaaaagtgaaacatgccgctcctttaacggcaaaagagcggcatatgtttccgctgtaagatcaggacttttccgcccatttcagatcaatgtaaccgacggggtgccggacaatgcccttcacgccgctgttctgcagatgcacctgattgtaaaagtaaatcggaatgatcggagcctcgttcatgagcagcttttccgctttatgcatgagtgcaaaacgttttttggcatcggcttcctgttttgcctgcttgatgtagccgtcgtatgccgcgcttccccagccggtgcggttcatggaattatccgtttggaaagcctcaagaaaactgatcggatctgcgtaatccggtaaaaatgagctttgagagaactggaacttcagccctttctgctcttctaaaaagacgttccattccatattggcgagcttaacgtctataccgagcacacttttgagcttctgctgaaccgcttccgctattttcttatgctccggttttgtgctgtatgtcaaggtaacggcgggcagcttgtcataatgctcttccgccatgcctttttccagcagttttttggcttctgattcatccggatttaataaactgccgcccgcttcgcggaaatctttcccgtcaggctgagtaaatccaggggatacaaaggcatgtgccggcttttcactgtttttggtcacataatccgtgatttctttctgatcaatcgctgccgcgaacgcttttctgatcttttcattttgaaacggctccattttcacgttaaaacgatagaaatagagtccggcctgatcccacgtgcggacatttttccctcccatcagctgctcgctcagctctgccggcacaaaggcggtatccaaatcccccgactgaaacatctgataatcggtattccggtcactgaccatcgcccatgtgactttatccagtttcaccgtctttttatcccaatacgtctcgtttttgaccatcgtcatgctgtcgtcatgcttccattccgtcagtttaaacggcccgttgccgacaaatgtttttgcttcagtgaaccatttcggatcagccttggcgaccttctcattaatcgggaaatacgccggattggacacgacgctcagaaaataatcctgcggcgccgccaatgtgacgacaagcgtttttttatcttttgccgtgactttcacgtcttcgtgtttgccttttccgctgttaaattcttctccgcctttgatcatgtagccgagaaaagcggaagatgcgcccgttttcggatcgagcatccgtttccaggcgtacacgaagtcttccgccgtaacgggatcgccatttgtccattcggcgttatcacggatattgaaggtatatgtcagcttatcagcggacaccttccagctttccgccatggccggttcgggcttattatcttttccgagcctcgtcaatccttccatgatgttattcagcggctgccaggaaacattattaaatccaatcggcggatcaagtgaggtcggctcattttcgttattgagccgcagcaccgtttcacccccctgttcttttgctttgccgggttctgtccccgcctgttcattggctgtacagcccatcagagcaaacgaaacaacagcaatcacaccgatcgcccatctctttttcatttcaatccccctttttcctctgctgccgtcagctgctgcttcagccgctctgcacggtgatcctgaagccagcagttgacgatatggcttttggatttcatggttgttgccgggtataccttttcacagacgatcatcctgtccgggcagcgggcggcaaacgggcagcccggcggcggatcgaataaatcaggcggcgtcccgtcaatcggcgaaagctcactatcctccatatccagacgcggcactgaacgaagcagcccctttgtgtatggatgagccggacggtaaaaaatatcatgcctcgtgccgatttcggcgattttccccgcatacatgacggcgactctgtcggcggtctgagcgacgacgccgagatcgtgtgtgatcagaataatagacacgcctgtttttctttgaatcttcttaaataattcaaggatttgtgcttgaatcgtcacatcaagggccgttgtcggttcatcggcgatcataatttccggctcgcagatcagagccatcgcgatcacgatccgctgccgcatgcccccgcttaattggtgagggtactgcttcaggcgggatttcgagtccgggataccgaccagatccagcatggcgagaacttcggattcagcttgttttcttgtcatggcgcggtgttccaacagcgcttctgagagctgatcccctatggtcaacgtcggattgagcgccgtcatcgggtcctgaaagatcatagaaatatcgcgcccccggattgcccgcatttcccgatccgacatttggcaaaggtctttctgtttaaattgtatgcttccggattcaatctttgccgaatgtttcggaagaaggcccatcacggcttgtgacgtcacgctttttccgcatcccgattcaccgacgatcgcaaacgtttcacctttatataaatcgaagctgacgcctctgacggcttttacagtgcctccgtatgttgaaaaagtaacatgcagattttgaacggaaagaacttgctgcgccatttttcctacctcctcagtttcgggtctaacgcgtcctgcaagccgtctccaagtacgttaaacgcgtacatcgtcaaggaaatgaaaaaagcggggaaaaacagccgccaccaatggcctgataaaatcgccggcagcccgtcgtttgccataactccccagcttgcaaacggcgcctgaatgccgagtccgagaaaacttaaaaatgattccgcaaaaatcgccgccggcaccgtaagcgtcatttggacgataatggctcccatcgtattcggcagcagatttttcttaataatccgaaatgttttcgctccaaacgttttcgaagccaatacgtgttcatcatgcttcatcctcagcacctgccctctgacaatccgcgccatgccgacccatcccgtcacggtcagagcgacgataatggaactgagccccggccccatcagcaccattaacaaaatgacaacgagcagatacggcaatccgtagagaacctcgatgattctcatcatggcgctgtctgtccggccccctttgtagccggcgacgcctccgtagataacgccgatcaaaaagtcgatcagcgccgccatcacaccgacaaataaagagatcctcgctccgtaccatgttcttgtaaacacgtcccggccaagttcatcggttccgaaccagtgtgaaaaagacggcggaagattctgctcggcgagcgtctgccttgtcacgctgtgcggtgatatcagcggaccgaacacagccgatagaaacaggcagcataatatcacaagcccggccatcgccaatttgttctttttaagccgccgccacgcatcctgactgtaagacaggctcggacgcttgaccgactcggtttcaccctttctttccgcgcccggctgaaaccagtcatcaggcacttctgtgtgttttaccgtttcttgcgggagattcatcaggatcaccctttcttatgaagttttatgcgcgggtctaacaggccgtatgccaaatcaaccagaaacagcaggacgatcagaatcacactgtaaaatacggtcgttcccatgatgaccgggtaatcacgctgattgatgctttctacgaaatatttgcccattcccggtatggcaaaaattttctcgatgacgaaactgccggttaaaatacttgcggcaagcgtcccgagtactgtcacaacaggcataagagcgtttttcaatgcgtgtttgatcacaattttgacgggagaaagcccctttgcttttgccgtgcggatgtaatcctgagtcagcacttcggccatacttgatcttgtcagcctcgcgataatggccatgggaccgacggcaagcgcaacagtcggcaggaccatgtgaacgggactcgtccaggtagctgccggaaaccatttcagatgaaccgcaaattgctgaatcagcagtgtagccataataaaattcggaatggaaatccccagcaccgcaaggctcatggccgcataatcgagaaatccgccgcgcctgagagcggccattatgccgagcgcgagcccggaaataacagcgatgatgatcgccgttatcccaagctcaaatgagaccggaaacccgcgttcaagcatagcgtttacactgtctgacggttttttaattgaaggaccgaaatcaaaggtaagaatggattttagatagatggcgtattgagtgataagaggttcgttcagatggtagtaggattcgagatttcgctggaccgcttcgtttgtgccccgctcttcgttaaaaggcgagccgggtatcactttcatcatgacaaatgtcagagtggtgatgacgaggacggtcataatcatggcgataaaacgtttgataaaataccgcagcaatgccgttcacccctttaacagaatgttgttctcatggcgagttctgtcatgacgagcatggcctgataggcttccggcatgtcttttgcctgaaattgaacgattgtcgttcccgggatgatttctgtgcccggcattaaatgggcccattcagcctgtccgtagttggcaaattcaatgcctaatacaggtctttcaggcggagtcagcggtttgaccttatctttatttttgagcgcataggctgttttttccgtcaggagccgtccggctttttgaggggacagacatttgaccgcggttcttgaaatggtttgtttgacggcggcagtcgtcacattcgggatcagctcctccgcctcttttgcggcgcaatcatctccggcagccatgatgacagggacatcgtaaaatccggcgagataggcatttaaccccagttcaccgaccggcttatcatttatgtaaaagtggcggacgccgaatatcatgctgtgcgacatgacgcccggcatcgacgctctcgcatgatagccgataaacatcacacccgaatacgattcatcaagcccctgcatcatggaaaacggcttgacatcccccgtaatcagctctgcctcagggtgaagtttttccgcgagcagattattcatctttgagtggctgtcattcacggtcacttccgtgcatccgttattaaacgcttctgcgatgcaccagtttgcttcttcggtcatcagaaccctgccgcgctcataattgtgcatgcgggaattgacaaatgtttcatcaggcagtccggaaatcccttccatatccacagatagatacagtttcatataatgcctccttttttacttaaaatttcgatattaaattatgaatattctaacaaattatattaaaaaaggatgaaacatgcaatataccattctgccattatgggaaaaaacaaacccttttcaccgggaaaagggtttgctgatagaaaaagttacatactgtttttgcttatatgatgacgctgaaactggctgaccgcacttctgtattcatgatcgggaatgacctgatgcctgaccggttcaggagcctgcggcgaaggctcttcagccgcctgcttacggacggcatgcggtttatgcgccagcttatgccccatgccggtcgcattcatgacaaatgataaacacactaaaagcaaacttaagatgaaagcaataagaaacaaatcgctgtatgtccccatcagcaggtcatgcgattgtgtgccgcgcgcgccccgaagcgtgccggaagcatctcttttcgtaaaataccctattaaaacaggagcgcccatataaatgaacagccttaaaaactgaactgccgtcatgcgtttcaccagttccggaagcggtccgcccaacgcggctcccatcagtccggctgccacaataagccctgtcccggccgccagcatcacgaaaagccccgcaaatagaataagcggtatatgatgatctgccgtcatccattggaaattcacgaacaccagtataacagagcctgttatgccgagcatgcccggaccgactttatcatatgctaatgcactgatgacagcggcgatggccacgcctcccaaaaggctcgcatataggaatatcagttgagtttgtgacatatgatatgcggtctgaagctccccgtgaaatgccgaaagactgaccgctatggaaatactgcccgcagcgatcatgaaaacacccagaatcggctttggaatcagcataagtttaatcgaaatcagcgcatgttcgtttctgtactgcatgatcagcaagatgagaagaatggcgatgcttcctccaaatcccgccaatgtctgccatgatgaaaagccccatttcggcagatgaataaatgtataggcggtcagcacggctgatacacccgctaacagaaaaccgatgccgtcaaatggagatttttcagcatttttatgagcgtcatcccgcagccacatataactgaaaatgaggccgaaaaaagacagcaggccaaaaatgccgaacagccaatgccaatggccggcgcttgccgccgccgtgcctaaaacggtccccataatgacggaaccgtaaaatccgccgattaacacaaataatgcgtaattccggcgctcaatcggaaacgaaagcaccagcatgggaatcataatcatcagcatagtacccgccgcagctccctgtaaaaaacggcccgcggcgagcggataaatatcatttgtcacagcagcaaggagcgctccgatgacacccgcggccatcgaaatcatatagacaggccgggagccgaatctttttcttaaatacggccccgccggcacgaataaggcaaatgccatattcccgataataatcggatgaaaagagtcaaagttttccccgccgaccgtctgccggacaaggctttggacagccgaaagagcggtattcgacatcagccccggcccgaccgccaatacagcaagcagagaaataatccagtgatgtttttctttcatgtgacagctcctttctgactatttgacaaagtgaaaaagctaacagatttcccccattagcttgacagaatttttcatatcttttcatgtgaaggattgaacataatatctcatttattatttcaaatccaatggaaattgtcaatataaagcgccgccgtccgatttcgtctttttcacaatttcccacaatcttttcattattatcccacactttttgtttaagatggagtcagtaataataggcaaatcatgctatgatgaaatagagaaacggagtgaacatgatggataactatcgtgatgaaaatcggacagaccaaaaagaacaggaagtccttttagtaaaagaaaacccgcagccggccggatattccgcgccggacgaggacaagaaaaaacgaagcttcggctggttcagaccgcttctcggcggagtgatcggcggagggctcgccctcggcatctatacatttacgccgcttggagaccatcagactcaagatacttccaatccggctcccgctcaggaaacgtcatcggtaaccgccaagcagacatcttctgattcgggaagcggcaaatcggcaaacagctcatcggcaaattcaagcagcatttcgaatatggtggaagacatttcaccggcgatcgtcgggatcaccaatctgcaaaagcagcaaagcagttccgatttattcggattcggatcaagctcagattcaaactctaattcgtcgggtgatgatgcggaaacgggatcgggttcaggcgttatttttaagaaagcaaacggcaaagcgtatattattacgaataaccacgtggtcgaaggcgcctcttcccttaaagtgtcattatatgacggcaccgatgtaacagctaaactcgtcggcagcgactctctgacagacttggccgttttagaaatcagtgataaacacgtgacaaaaacggcaagtttcggcagctcatccgctctcagaacgggtgaatccgtcatcgccatcggtgatccgctcggaaaagacctttcccgcaccgtcacacagggcatcgtgagcggcttaaacagaaccgtctcgatctctacgtcagccggcgagtcaagcatcaacgtcatccaaaccgatgccgccatcaatcccggaaacagcggcggaccgctcttgaatacagacggcaaaatcatcggcatcaacagcatgaaaatcagcgaaagtgatgtagaaggcatcggctttgccatcccgagcaacgatgtaaaaccgatagccgaagagcttctcacgaaaggacaagtggagcgcccttatatcggcgtgagcatgatcgacttggaacaagtgccgcaaaactatcaggaaggcacactcgggcttttcggcaaacagctgaataaaggcgtttatattcgcgaagtggcgcagggctcacctgcagccaaagccggattaaaagcagaagacatcattatcagcttaaaagggaaagaaaccgacacgggcagcgaacttcgcaatattctctacaagaatacgaaagtcggcagcaccgttgacgtgaagattatcagaaacggcaaggaaatgacgaaaaaaatgaaactgacacaaaaagaagaaacatcttcttaacaaaaatccaaggcagccgccttggattttttatatacagatgaaactttaggcctggatcagccgtatgacctagtgtacaaaggaggatacatacatatgaaacaaaccggacttttgctggtcgttaccggcctgatcttgctgcagctgagcattcagcttcctcagcaaaacgctgcttggggaatgacgcttggcgcaagcattttactgaacctttcgggaaccggactgatcatgcgctctctgcacacgcagaccggccgcagatgaataaaaaaagcaccctgtccgctggccggacagggtgtttcggttaagacatatgctggtcccgataaatcttttcgtttttcatgccgtacgctttttgcacgatatagagcggacggtcttttgcttcgtcataaatccttccgatatattcgccgatcattccgagcattaatagaacgatgccgctgaataacagctgtatcacaatcagagaggaccagcccgtaatggtgctgttcgtaaacagcttcatgtataaaacgataaacatatagagaaaacccgctccggacatgatcattcccgcatagcttgccgccttgagcggtttatgagagaacgttgtgattccgtccatggaaagcttcagcatttttttaagcgggtatttcgtttcccccgcaagcctctcatctcgttcatattctacagcagtctgcttaaagccgacccagctgacgagtcctctgacaaaaggatttttttcttttaatcttttcatctcatcacagacttttctgtccagcaggcggaaatctccggtgtcgagcggaatatcaatatcagtcacgctccgcagcagccggtaaaacatagaggccgtctgtttcttgaaaaaggtttctccctttcgtttcgttctgacggcgtacaccacatcgtagccttctttccactgctcaatcatatcaaggattaattcaggagggtcctgcaaatcggcgtcaatgacggcgattgcattcccctctgcataatccatacccgctgtgatcgcgatctgatgtccgaagtttctggaaaaatcaataattttcactctcggatcaatcagactttgctctcttaaaatctcaatactgcggtctttgcttccatcattgacaaagatcaattcataatgctcttttgtttgatccatgacttctttcaggcgctgataggttgtctgaatgacgagttcctcgttataaaccgggacgactattgaatattgaatatgtctgctcatgttttttcctcctattcatcagattgaagttcgtatagtgaagctgactgattcattccgcccggcccgccgctcattcggctgttttcacccgcggccttgctgctttttgtatcagctgcatcatgatttttcgttttctgatctgtgcttgattgccatttatctgaagatactttctttccgtttttctcaacccactgcacaatatcgttatttccgcctttgcccattccggatgttaagaagtattttactttcccttgttttacgagctttttaaattgagtcagcgtaatggccgggtcagacccgctgaatccgccgatcgccatgaccgcttttttcgttttaataatgtaaggcgccgccgtgttggaatcggttgttgcaaatagatagtccgctccggcgttatgtttctctaaatagttgatcagttttgtattgacagatgcgttatccattcccatgccttttccgcttgttgaagcgagctgagggcctgtttcaggcaatgagctgttgcctccgtacagaagcggtgtgctcgcccaataaatcggcatcaccatcaagacgagaagggctgcaagtgaaacatagtaactgagcggtttttggcgctgtttgaatacgaacagggcgattgctgccactgcgccgagaacgcctgctccgatgctccagcctgcgccgatttgatcattgtagtttctgaggataaacagctcaaatccggttgtgacaagaatagcggccggcaatagccaagttttccatcccgcctgcttgcggtacagatgaacgagggcgacccatcccgcaccgacaagtgccgcgatcggaggcgccagcataatgagataataatggtggaaaaattccgccacactgaagaatccggcaatcggcacaagccacgctgcccaaaagatcgtttccttctgttctgctgataatcgtcttctttctctcgccccggcgatcaataaaccggccattccaaaaatcgcaaacggcaggagccagctgatctgatcagataattccgtttggaaaaggcgcagcggaccaggggttcccgtaccgaacattcctgaacctgattgcattttcgagccggtgcctgtaccgctttttcctccgccgccgggaccgcctccatctccgccgcttggcattttcccgttagatggaggtgccgtcatactgccgttttgtgatttgtctccgcttgctgaactgctgcttgaagactggtcaggcggtttttgcatttgtgaagaaccgccggaagaagacatctctttcgatgcgtttccgtccggcccgccctggccgccgccggaactttgccctgtcagccgctgaatcccgttatatccgaaagccaattccaatacggagtttgtctggctgcttccgacatatggccttttgctggcaggaatattgtcaacaatgagcggccatgacaatgaaacggctgctaaaacggctaacgcgcttaccaatgaaatgatttttttcttaatcgtggtgtttgccgtaatcatatagaacagcaagaaggccggcaaaatcatataagcctgaagcatttttatgttaaagcctgctccgacgacaaaaaatgccgccaaaagccagatcagtctgccttttctgatcgctttaaagagaagccatgtggcgaacaagaggaaaaagaccagtaaagcatcgacattgttcgtccgcgcgaccgctactgcgatcggtgtacacgccatgacaaatgaggcgatgcgcgccgccgttttcccgaacgtcggctttattaataagtacatgaatagaactgaacctacacccgccaatgcctgaggcaggatgacgctccacccgtgcataccgaatatcagcgcgctgatcgtttgtatctggtatgtaacaggcggtttatctaccgtgataaacccggctgcgtcaaatgaagcgtaaaagaaattatgaaagctttgaagcatactcgttaccgctgcggtgtaataaggattcaccgtatcgtcattccagatgttgtacatattcaagaatgcggaagcgagtaaaatgagaattaagactgcgtctatctcgcgttttttcattttcacctgtgttttcactccttttgtttaactttgaacaagtgtaacaaccaaatgtgaaaaatttattaataaacaaagacaattattttgccgtttacaaataggtaaaaagaatgacaaaacgggtaaaaaagcaaaaaaaagatgcccccgtcaagccgggaggcatctggcatgatttctgatttactgaatcggtttcagccgcgcttctatttcagaacggcggtgttcgagataaggcgggagcgcaaccgttttgcctagctcttcaggtttttcatcaaccataaatcccggaccgtccgttgacaattcaaacagaattccgttcggttcccggaagtacagcgctttgaaataataacgctctacaatgcctgagttgctgaaaccttctttcgtaatgatgcggtgccataaagcaagctcctcttcattctgaacgcggaaggccacatggtgcacgctgccttttccaggacgctcgcgcggaagatcgtttctttcaatgagatggacttctgtacgcgcgcctccgtttccggattcgagcaccgtaaccgtgccccggtcttcatgcgtttctttcccgatttcagtgaagcccagcacatcggttaacacacgcagggtcggttctgcatacgggacggtcaattcaacgggaccaagaccgcggaaagaatattcttccggtataccgctttgcttcaccgcttcaccgatgtcttttcctttttcgtcagctgtcagcacaagccgctgtccttcatgatcctgaaaagcgagtgtgtcccggcccgctattttcacgatctcactgtgagagacctggtgctcttcaaatcgttttttccaatattgcagcgcttgtgcgtcagggactcgcaggccgattgatgaaatactgtttgttcccgcatgaaacggcgcaatccgcggaatttcgaaaaacgtcaattcagatcccggattggctgtttcatcaccgtaaaacaaatgatacatcgtcggttcatcttggtttacggactttttcacaagcttcagtcccaggatgttccgatagaaatctaaatttttctgcgcatcagccgtcaatgctgatacatggtgtattccattaactttcattatgttatcctccagtcaattatctcgatttcgagatattttatatatacaatttatgttatccggatcgtaaagtcaacccatctgcttcacagacggtctgcagactgccgttccccaaataacgaaccttagatattaaaaaaccattaatgttcgcttttaaaacggtattttttccttcttaaaagcataaacctttatcttttaggcaaaacgacaaaatcagaaaatttattttattcgtgtttcagcaattagggtttacaatatggaaaatagttttttcagcatgacgattttacatctggagggaaaggatatgcagattgaagagaacggacttaaaaaagagatcggccttaccatcgccctctcacttgttatcggcaccatcatcggttccggcgtatttatgaaaccaggcgccgtgcttgcctactccggtgatgcgaaaaccgcgcttatcgcgtggctgttaggaggcattttgacgcttgccggcggcttgaccgttgcggaaatcggcactcagattccgaaaacgggcggactttatacatatctcgaagaagtgtacggcgaattttggggctttttgtgcggatgggttcaaattatcatttacggccccgccattatcggagcaatcggcttgtatttcggctctttgatggcgcacttgttcaattgggattccggctggtctaaattgatcgggatttcagccgttttgtttttaagcatcattaacattatcggaacgaaatatggcggcatcgtacagggaattacgactgtcggcaaattgattccgattatctgcatgatcgtgttcggcctttggaaaggcgatcagcatatttttacagccgttacaagcagcatgtcggacatgaatttcggcgctgccatactggccaccttgtttgcttatgacggatggattctgcttgcggcactcggcggcgaaatgaaaaatccggaaaagctgctcccgagagcgatgacgggcggactcttggtcgtcaccgccatttatcttttcattaactttgcgctgctgcacattcttcccgcgaccgatatcgtcaaactcggtgaaaatgcgaccggcaccgctgccggaatgctgtttggcgacatcgggggaaaattgatcagcgtcggaatcatcgtcagcatcttcggctgtttaaacggaaagattctcgcttttccgcgtgtctcgtttgcgatggcggaacggaaacagctgccgtttgccggacagatttcgcgggtgcatccgacgttccgcactccgtggattgccgtgtcatttcagatcgcgctggccattatttttatgatcatcagcaatcctgataagctgtctgaaatctctattttcatgatttatattttttacgtcatggcctttttcgccgtgtttatcctcagaaaaaaaagcggcggaaaaccgcgcgcctacagcgtgcctctgtatccgatcattcctgttttggccatcgcgggttcactgtttgtgctgatcagcacgatcattacagatacactgagctgcgcgctgtcccttttgatcggcctcgccgggctgccgctttatttttggctgaaaaacggcagaaaaaactgacaaaaacggttccttttacgggagccgttttttttcggcaaaatcacgtgcaaaagttgacagcaaattcacatcttttgttatactttttaagcaagatgtctgaattcgaagtatgttacgtttttttggcaaagtgggtaacataagaaaaacaggatgagacacgtttttacgaaaaaatcaagaggcgtttttttcgactttatctattttttttcgacaaaaggctatataataatttgatgtgtgcattgtctcattcaaacaatggagggtttttaatgataaaaagaaaaaaagataagttctcactccttttaacagaaatcgcaaaaaatatagatgaaactgcagagtattttgtgaactttaaagtcacaaaccaaacaacacttaaagaatttgcagatacgttaaaagaatacgaaacaaaaggtgacaatcatgttcatgtcatgattaaagagcttaacaaagcattcatcactcctattgaacgcgaagatatccttcagctgacaaacagcctggatgatgtgcttgacggaattgaacatttctctgccatgatggagattttctcaattacttcatcagacgagcatatcgacaaattcagcggatacattagagaatgtgcgaaagaaattttaattgcaactgagctgttggcagaaaaccgcttaaaggacattcagcctcacgccatcaaaattaaagagtatgagcacaactgtgacaacctgcacagaaaatcattaaaaaatcttttcggccatgaaacagatccgatcaaagtgatccaatatcgtgaaatttacgaaacgcttgaagaaattgctgactcttgccaaagcgttgccaataatcttgaaaccatcattatgaaaaacgcgtaacgaggggttaaaatggatactctattacttttaacgatattaattgtcatttgcgctttggtatttgacttcattaacggatttcacgataccgccaacgcaatcgccacctcagtttcgacaaaagcgctgaagccgcggcacgcgattatcatggccgccatcatgaactttctcggagcgatgacatttaccggtgtggcgaaaaccattacgaaagatattgtgaatccttatacattagacaacggatcggttgttattcttgctgctttactcgccgcaatcgtctggaacttgatcacatggtatttcggcattccgagcagctcttcacatgcgattatcggagcgatcgccggtgcggccattgcagcatcaggttttgcgacgcttaattataaagggttcattaaaattatcgaagcacttattttatcaccgatcatcgcctttgttctcggctttatcgtatattcgatcgtgaagctgatttttaaagacagcaatctggcgaaaacaaataaacgcttccgcagagtgcagattttgacggctgccattcagtcctatacacacggaacgaacgacgcgcaaaaagcgatgggtatcattacgatggcgcttatgacggccaatttacataaaagtgatgccattcctttctgggtgcagctctcttgtgctctggcaatgggtctcggcacatccatcggcggctggaaaatcattaaaaccgtcggcggaaaaattatgaaaatccgtccggtaaacggcgtatctgccgacttaaccggcgcagccattattttcggggccacgtttattcatctccctgtcagcacaacgcacgtcatttcgtcttccattctcggtgtgggcgcttcccaccgcgtaaaaggcgtaaactggggaacggctaaacggatgctcattacatgggtcatcaccctgccgattgcaggtacactcggcgccatcgcctttttcatcttagatctgtttttctgatgacatccgcttctttacagaagcggttttttttgtgacaggaaaatgatgtcatgacatagaatgaacatagcagaccatttttcaaattgtgagggatgctcatgcttttgttttttcagatcatggtgtggacgatggcggccgcactcattttatatgtgtacgcatcctggcggtatgaggcaaaggtaaaagaaaaaatgtttgccatccgtaaaacgtggtatttactatttgtactgggctccatggtctattggacatatgatcctgaatcgctctttgccgcatggagacaatatttgattgttgccgtctgctttgcccttattgatgcgtttatctttttgagcgcgtatatcaaaaagctcgccggcaatgaattagagacggatacgcgggaaattttagaagaaaataacgaaatgcttcactcctatcttgaaaaactgaaaacctatcaatatctgttgaaaaatgaaccgatccatgtatattatggaagtacagaagcttatgcggaaggcatcagcagactgctagccgcttatgccgaaaaaatgaatgtcacggcttccttgtgcgactattccgcacaatcggataaggaccgcttgacggagcatatgcctgatgcggcagacgttcagtcccgtcttaaccgtaaagacgtctactatgatcaaaaaggcaggcttgtgcttattccgtttacagtccagaaccgccattacgtgatcaaactcacgtcggaaaacctgttgacggaattcgattatttgcttttcacatcgctaacaagcatttatgatttaatgctgccaatagaagaggaaggtgacggttaaatggagcaggcatttcaaaacgggcagccggaacaaagagcgaaaccgttcaaaatgtttaaaaaacgttcaatgacaagtatcgcaagttaccaggtcagccctcataccgccagaattttcaaagaaaacgagcggctgattgacaagtataaacaaaaaaaagcttgattacactaaggacaggagacacggctcttgtccttattccttttttccttatctttcatataataaaaccaacaaagagatgcgacaggtgatgatgtgaagaaaattgtcaggcgtgtaaagtttgtggattacggacgcttcgggctttccgcttattcgctgaggatgcgggcgaggaatctcgggctattgaaccggttaaaaaagaaaaaaggctgaatcccgcaatgtgaacgggactcagccttttttgttaaagctgcatcagaattttcgcttttacagcgggactgtagacgccgtcagacgtcagcccgtttacagattggaagcgggccacggcatctgcggttttcggaccgtagataccgtcaattccgttattgacagctcctttttcaggatagaaataaagcgcggcgagcgcgttttgcacctggtataccttttcgccggacgtgtacggctctgtcagctgaatcacctcgtccgggagagaatacagtgcttcaaccggcgggctgacgatcagtacttgtccgactttaatcaagttcgggtcagcgatgttattccatttctgcagatcggccacgctgacgccgaatttccgcgcgatcgccgacagcgtatctcctttttgaacggtatacgtctgtctttccccagaaccgattcccgctttaaactcatcccatgtatccaacagtcttctcggacaaagctttcctgaccaatgcttgtgcgcaacgacatttgcaagcgggatgccgtgcgacatcattaatgtgcggatgagccattgggcgtttgccacggcctgtgaaaagttgccgtctgcgttttcacaaatttcaataccgatggatttacggttgccgtctccgtttccgtcaccggcatgccagccgttttcattcagcggaagatgctgataaatttccgtatcatcgactgtgaaatgccagcttgtcggtgtatcgggatttttcacatagcttgcgtgacttttggcgttagctccgactgcagtattggctgtattgtgcaccgtaatgtaaatcggtgtcattgcatagcctgggcggttattgtttcctgccgggataaaatcctgtgtgatttttaccatattctcatctctcctatttcgataaattgtttatttttaataaagcctgctgttttttcccttttgctgtaacgtaattgtttttaaaccaggcggcggcagtcgttatgattgtaaaaacggccgacccggcggcatacagcgtatctgcaagctggctgacctggtcctcctgaatattcagcggcgatttgccgaacatcagcaaagtttgattcaataaagcaagcaaaagaagcaccgtcctgacgaccgtgcctttgtccgcgaatttcatatcggtttcccccttacttttgcagcagattgtacatgatggcgatggctccgccaatgacgcccgtgcagattgctgtcacgatcgctcctgtaatggtccgcttaatccatgttgtgttttcgtcaattttgttcagtttttcattcagcgtcatgatttgctgatcctgccggtcggatacccgctctaatgcggccacccgctgttcaagcaccttttgttcacctttgatgcctgcgaattctttttgcaccgcttgttcatccagaagcacttccgctcccccctcttacattgttctcacctcccttcggaagtttcattcttaagaaaatgccgtgcctttgacagaaaggctcccgccggaaatgcttttgatttccatgatgatttccttaaaaccggcaatatcaaatgaccacacttcttctgtgcctgacgtactggcggctgatgtcccgtcatcagacctgattcctctgatcggcacattttttcccgagatggatctcccccaaaacgcgacatggcccgactcagccgttccggtgatttcgacgagaagttttttccaagcgcccgccgcgaagatgcttccctcgccagcctctgctgcattttcatgaaaaatcacgtctgtatatgaaaacgccatatcaccgcccgtcccgacagattggtataaaacaaattcggactgcttttgatttccattttcaaaacggaaccgataatatcgttttgtcaggcagacccaccccgaagcggtcagcactccgccttttactgcgagagaatgtgaagccgtccacgaattgttatcctcactctcttcgataaaaagagttccgctgcggtccgaataagcccacccctgtgctctgtctattaagacggctcctaaacggtcttgtccgaattggctgtaaacttcaatcgcttctagcggcgtattggtaagaagctctgccattccggacaaatcagcaaccggtgtgacataatcgtttttgttaccgcgataagcttttactgcgccgggtctgccaagttgatcggcgggaaattcaaatgaatgctttttcatcggccgtcctccttttctcatttactaaaaatgacaaataaaaaaagccgtttggcttatgacacagcatttttataattttcgtatgtttcacccgttatttcttgaaattcctcaggcgtgatatacttcgcggccacaccttcagccagatcttcggcagagcagtcatcatagcccatagcctgttttaccatttctattgaggcccacttataaaacaaagcgtacacccaaaagttaagtctcttcattttttcattctccttttacgtttaagaattccagttttaaagacgctatttcttcacctaaagctttattcaacatctctgttttctcccttgctgccacttcggcagacaattgtacacctaaagcattttgagcttgttctgcttgttttctcgctagtttttcatctgccagttgctgtccgatttctttcaactgttccacaatgggatccggctccaccacatcctgatacttgtttttttgattttccttatattcttgatcagcagattcgttccaaattttatttacttcatcaaactgcggtctccataaaccgtccggaggttttatggatgttgagttttgcggcattatacttgatgtactgtctaagatttcaggcctttgaaaataaaaattctcatcatacaaaaagacttgcatattcatcccccattacaaagtgaaattattatctattgaaatccccgtaatattcccctctattttggcgtattttccattaattctcaattcccctgttggttcagcataatattttgttatcccggttgttccaaagagtggggcagccattgatttctgtgttgaaggatgagcttcagcagggagtacagcaaaaacactgtcgaagtctggaggaaccacttcaccacgtgtgaatacctggttgccccacactgcatactgaggatttcttgcgccaaccttatgtccattaattagtgttaaatcataccaagttattttattaaaatcctcttcagtaaatagacgtttccaccccttaaaaacaccgtctgtatgaacagttgcaatccatacattgttatcgtaacttctccaagctaaaatcgacttcctccctgactccccctcaaccacatcatagttaaaccaggaattatcattttcaaccggattgtttttcagctgagcacccattccacaataaaaccccgagctcagcgccagtatgtctgatccgttttctaatcgtgtccgtctcccatcatcctttgtcaacttcgccaactggccgccgttccatttgtctctttcgataggacttatatgaattgatgaatctatcgcatgtgcatcgacctttgactgcgctccagctatggattcaattggataccaattgattgctgtttgattagagttataataaaaccaccatgcattacccttcacgtctacagcataaccattacctattcccggctgccccactaactgcatacctcgcagactcgtatttgacgggttgtctgttactgcattggttccgtaaaaagttacagaaccaacatcttttaacgagtcataaaacgagccggaagttaaattgattttttgcgtgccgttatcagcggtgattttaaacagctgccctgcattccatgtatccttctcagctttcgttacatggatatcagtctgatttgtgtgggcatcgacttttttttgggcgccttccgaagtttctaactgaacccaatcagaccagccggaagctttaagggtttttctccatgtgcctccttcataatccattgccagagcctcaccataagacttgaatccgatatataagcctctggtggaaagcggaggagtatgaactcccgtgttatttgtgtaaaagaaaaaagattgattaagctggtctacaatttgatgaaaatccaagccatcttgtatacttattaaatatttccctgaatcatccgtcagctttgttaattgcccgttattccacttctggcgctcttccttcgtcacatgccggtccagatcttgattgtgctggtcgaaatctttttttgctgcctgctggacattgtccacgtttccgaggccgatttgcgcctttgtcgttttgtgcgggttgttcatgtcgtttttatgggccgccagatccgtgtgggcgtcttttatgcctttttcccagcggttgacgtcatcttcgttaatcggatcgtccggaagccagtctgttttttcttcgtaagccatcgttacaccacctcaaaggtaaatcttaaatcaagcgttctgttattgctgagatctaaatttgtttttcgttctgtgatgacgcttcctgtttcgtcaagcatctgcacggtttcaatgtgtttgatgtcttcttccctgcgtgtgagaacggtgactgcggcatcttttacggaaatatccgcaatcggagtttctttgccgtttaacagcacttttgtgatcctgtttttcagatcggctgcggcacgctgtctgtaagcggctgatatcatggtaagaccacctcgttattgttgagtgtgacggaataaccgaccttcagttcactgacttttcggtatctccgattgttgagaatgacccggtctttgatttccagtgtttcgtttaatgcggctctcagtgtaaacgccaaatgagcgggtttgatcttttcaagcgttccaatcagctcgttcatgtgctgcaggtcatcaagcccgatatcggcataaaaacgatactgccccggaaacatccgtacgtaagctgatggatgttttaaaaaacggtttagcgcctgctcgatcgcttgatgtgtgatgggcggaatattcgacatcttggaaatcagcctgagccgtctcatatcctccgtgtcacctgattcccgcggtatttttaatattttttcccagcggtcaagcccccacgtcgccgtcgtgataaagagctgatctgtcaaatcgaaaatatcgttattctgccgctcaaactcaggagcttccgcctcaagcagttgtgccatctcctttaatcgggttaaaaacggcgggaggtacgccgtcatctcatcgagtctgctcaaggattgtcacctctttgagtttaggaatttccacatcactgagcacgaggttctccgccgcaccgttcattttgatatcggcgtagtcactgacggatgccgagttataaacgatgttgtttatttgtgataaacggacggtgttttcttcgaaggccattttcttaaataaattcaggacgcctttttcaatctccgcttttacgtcatcaatcgagctgttcagctcaggcagcacggaagcggagatttcgatttccttccatacggcgctttccaccgttactgccgctccgatcggcgcctgtccttctccctgcccttcgtccggatcaatataatcctttacttttttgatgagaatatctgatgccggttccaaattcgcatttgtgatgacaaccttcaccgttccggctccgttccaaagcggaaagatttttgccctgccgacgccgtcaacctcttcggcccattgtttatagtgctgtttatttgcgctgactgcttcccggcggacacgagtaaaatagcgcgcccttaagctgttgtcatcttcttcctcacggccgggaattaatatatcgcgcatgactgctttctcaagcccgggtatcgtatcaagcggcagcatgttctgccctgaaatgccggcattgccagcttcaccggctgtttcacattcaagcgttccatcccccgtatattgaaaatacaggttatcaacgaagaaacgggagcctggcggaatggtgatgcccgctgtgaattctccggctctgaccgcttttgtggcaggtgttcgttcaattcccgcttcagcagcacgcctgtccagaaattctccctgagccgtatcggaaaacacgagctccagcacggtatcaagccaaatataagactttgcgagctcagcggccgcaggcgcgagcgcattgtaaatgacgctgccttctctcgtatcaatatccgccgtaacgcgcgccagcattctgtccataatgtcgtcaaacgtctgagcttcaaacatcctcacccagcacctcctctatctcaagcatgccctcatcagtttcaacggtaaaagagacgattaaggcatcatcttttttctcaatctcaaaattgataacggccaaaatacggtcatcatacagcaaggcttcttctatcagtcttgggatctccatttttttataagcatccgtcgtgttctgatctgaaagcacttcctgaagttcgtttccgatatcatggctgaaaaccgaatatgaataccgttctgtgtgaagagcgatatagacgaattgcctgattgcgtccagtccgtttatcagttcattggtaatccggttgttttcaaaatcaattcggtaggtttgtgaagtctcaacggcctcactcgcatcctccaaatcttcaaattcgatttccggtgtcagggccattgcacccgctccttttagatttgttcatgtaaaaaagccctcttcggcagatgaagcggctttaataggctgatattctcgtacatctccgtccggatgccggttaaattttgtccagtacaaagaaagactgtcctcctgttaaagcggcggtcatcacccgatctcccgcctggagctgatcatcttctccggatctcagccgcttcggcacaatgagtgcatcagacggaatcaaaagtttgtcgtgatctttcaatttcagctcgagcggcgaaacggaggtcacttcggccggcatcagctccaccggcgcttcggcgtcaaccgctccgacggctaaatgtttaatggcatcacttaatctcatcaggatgtcccctccggaagtgaatttttctccgtgacgtcaatcgtcatggtatgttttgttccttggaattcatggcggtccgtatctacataataggttttcttcagcccgatttccggaattgaaatatagaccggcaatccgctttccaacccaggaataccgaccgcctgtatatttttcagctctttcttaacgccttttttctcagcctgcttcacttttgcgcgctgtttcagctgagcttcgttaatatcgtcagaaaccgtttcggtatactgcaaaacgccgaatgttttcatgcccgcgctgtctgcggcggaagcctttatcgttttattgtctttttgcagccgcatgacgacacgggttgcggtgtcatcaattgaggtgctgtattgataccctgtaatattaactcctgtttccagcacccatatgtcagacggctccggccattcacgcaagccgagcctgcctttttctgaatagagctgataattgcgccccgtctggctttttgtctgctttaacgcttttagcatcatatcgtaaaggcttgtatcatttttaaaaacgagtgatttaatggtatggcctgtgttagcaatggatgtgacgggaatttgaaaatcgctggcgatcctttttaatatttgatcggcgcgcttgttggaaaacacgtaaacgtcctggtttttcacaaggtattgaagcatatcgtatgcggtgaaggcgacggtatgctcatcgggcgttcttgcaaaaacaacgccgcggaacagttcttttccgttccatttgaacaaaaccgtatccccttctgatacgccgtaatacgtctggccgccctgctttacgacaatcgtcgcttcgatggaacggggcgcctgatatctgtgtccttccagcgttacgctttctgtgacaagctcgagccactccgtttcttttatgacaaatagttcaatcatcttttcacccgtttcattgcggtatcttcagcttctgccccgggaagatccaatgccccggctgccggatattccgtttgctgcgcttaatcatggcggttttattcgcgttccagattttccgccactccgtgtgttttccgtaaaacttgccggcgatgtcccaaagcgtatccccttttttgacggtatatgttttgggtgaagctttggacgggcgcttcgctttcgtttttttcttttgtttgatttttcttggcgaagcggttttatattctttcagtacgatatcaaaattccggtcgccgatttcattgtcaccttcgctgtaattaaagctttcaatgctgcatgtgacattgatttttgtccctgtaatcaaaaactgaacgggttttttcgctttcatccatgcttcaatggctgaaatggctttttccggcgaagggatgctttgatattcggcaatcgggctgtaccgtttcggaaaaaaagaagagaacgaaatttctttcgctcccggttcttcgataaacgtcacctctccaagtccggtgactttcacggaatcattctgcacgctgtttgcgatatcaatcgcttcaggaagaacgggaagccggagcttgtccttcccctgagacagccaaaattcgtaaacagatttagtcaaaagcaacggccccctttgctccggtataaatgtctttttgcagttcatcaatcagcgcctgtttgattttggcggcgaggctgtcggcgtcctgtccgttatgaaaatgctgatcgccgctgaattcgattttaatttcttttgttcccgttttttgaacggtttgtccgccgcctttaacggctgcggaaaccgtgccggctgagagcgccgccggttccgtctgggacggatcggacacttccatgccgagcgcttgagccgctttttgcagcagataacggccgcggatgccccgttcttcagggatgatccactcccgtttgttcccttcgccgacacgggcgatctgctccttggtaatcagacccccattggcataaccgacgtaagggcctccatgagccatacttttaatcccggggacattgctgatcgagccgtatcggcttttaatatagccgatagcggcagcggcgttgtgaattggatttctgatatcattcatgcccggcgctttgtgatcttcaaaggtgctcggaatcgtctgcataagcccctgtgacgggtgtccggctttggcgttgctgtcccatagattaatggaattagggttgccgcctgactcatgctgtgcgatcgtcattaatcccggaagccagctgatcggcgtattggttgctttcattgcggccaatagccactctttgatgcttcctcccgctgcacccatgccggaaaaggctgctgcaagcgagcctgcctgtttttcggcgtattttttcacgtcaactgagctgagccctttgacgacgccgactgaagcaaagcgtccgagactcatcatgacacgggaaggagagtgaatatcaagctcttccctgaatgcgtcctcgacttttttggccatatctttggccgcctgtttgacttcgcttccttttgcagtcatccctgatacgaagtgtccgatcaggcctgacccccagccgttcgcggaatctcttgattgcacaaacggtttattgatatgtgtgcttacgtattgcgacgttcccgtatcttttgcattctgtccggccgaatatcctttcaccgttgcggcgccccatgatgacgattggttaaccgccgattgataaggtgttttcacctttgtttttaaaaatgaatcggtgcccgtcggcgaagtattttgacctttggcatagcccgcaacgacttgctttccgtaaccggatgaagacgaaatgagggcattgaacggcgttccgatgtttttttccttccagccgtccatatccaccgattttttgctgattccgctgtcaaagccttcagtaaactgtttgccgagtgatgaagccgtcccggcaaatccggaagaatccacagacgctgcggccgatacagatgcagaagaagaaacaccgcccgttcccgccggaacagcagaagactgagccgaagccgcgcccatatcatcgacaacacgcatgccgagcttagacgcagcttgtgaaagcagcatctttccgcgtccgcgattgttgtcgacggggatgacaaattctttaccggcttcaccaatccaggaaatggtcggctttgtaatgtagccgcctgtggcgtttttgtctggttttttctttttatctccgccgcctcctgtgacaaagttcattatgcctgaaatcattttgccgccggttttatcccaaatctttttcacccagtcgaatgctgcagaaaaagcatctgatatggctgttcccacttttacaagaggttcttttatatgtttctcaaaccagccgcttaaccctttccatataccctttaccgtatctaaagcagtctggaaagcatctgatattcctttaccgacattttccaccatgtctttcaccggattccagacagtatccatgaaccagccggaaaccgtactgaaaacggatttaattttatcccaagctcctgtgattttactccaaatggacgtcgctactccgacgacagccgattttacgggcccccacaccgtgctcataaaccagccggatactgtgttgaagacaccctgaatcgtcgtccacgcattcacgatatttgaccagatgctggttgccactccgacgacagccgatgaaaccggcgtccatacattctccatgaaccaggatgacaccgtgctgaaaatcccttgaatcgttgtccacgcattcacgatatttgaccagatgcttgtcgccactccgacgacagctgatgaaaccggcgtccatacattttccatgaaccaggatgaaacgcttccccaagtatcttgtattgttgtccaagcactttgcgccgctttggaaatatcattccacgtgtctttcaaagctcctgaatcaaaggcctctcccaagctggaaccgcctaaactgccggcgatgccgcctaccgcgccgccgattaatgtgcccactccgggaacaacgctgccgattgccgctccggccgcggctccggcaagaccgccgcctgctgagccgaccttctctcctgcattatctttattgatgccggctaaatcagtgagtgataacaattcacctatgccgggaattcctttagcggcaccttttaaccctttcataccgccttttagcgcctttgaatctcccaagcctttcaaaagcgcgccgatgcctttacctgccccttttgttttcggcgtatttacggatgcctgtttgcttccctttgcggatgaacctcgttttgaagatttattccgcccttcgactttactgcttttgcccctcgtcactccggtacagcagcagcagccccccaaagccccgccggtttttttggctgactttcctgaagattttggtggtgctgccgtgcgctgcggaccctttgtcagatcaggacgcttcgggctgttggtgccgccggcagaaaggccgcccttactcttttcttttttcgtgccgcctcctaataatccgccgatattgagtttgcctaatttttcagcgattcctgaaaatattttttctattaattccccggctttttcgatgattttgtccgggctgaatttctcaaatttctttgcaatcttgctgacaattttatcaacaaatgcctcggctttttcgatgatcgcatcaggactgaatttgccgaactttttatcaatgcctccgaacagtgaggatgtaaactgctccactttttccaaaatcttatccggattgagaaaatcgaatttctcagaaattcggtcaatcgtgtcatttacaaattgttcggcgcggtcgattagcttatcaggactgaatttaccgacaacgtcgtcgactttcttcataaacgaatcagtaaaatgatccagctctttcaatatggtctccggactgaatttgctgacaacgtcatctatctttttcataaatgaatcagtgaatttatccagttctttcaatatggcttccggactgaatttactcacgaccccgtctacctttttcataaacgaatcagcgaatttatccagctctttcaatatggcttccggactgaatttactcacgaccccgtctacttttttcataaacgaatcagcgaatttgtccagctctgctaaaatcgttgcagggctgaatttgcttgcgatttcatccacttttcccatgaatgacgttgtgaacttgtccagttcggctaatatcgtctccgggctgaatttgctcgcgatttcgtccacttttcccatgaatgaggtcgtgaacttgtccagttcggctaatatcgttgcagggctgaatttgcttgcgatctcgtccacttttcccatgaatgagctcgtgaacttgtccagctctgctaaaatcgtctcaggactgaatttgcttgcgatttcgtccacttttcccatgaatgaggtcgtgaacttgtccagttcggttaaaatcgttgcagggctgaacttactcgcgatttcgtccgctttcttcataaagcttgcagcgaatttatccagttccgctatgattgtttccggataaaatttggatgcgatgtcattgacttttttcatgaaggtgtctgcaatggagtcaagcattgaaaaatcgtttttcggcgaagcaggagcagcagatgcagaagcttttccgacgtccggcatattcttttgcattgcagccagctgtgctgtcaccttttcgtttaacgataattgaatgacattgttttttcccgtcagcgaatcaatgcccgctgaaattcggccgactgttgtcatgacgtgatctatgacgcgtatagtgacagagtacccgttctttaacgcagattgcatgtagcgtttgatacgttccatggcaggagtcacttcgtctgacgcatacagtgaaacggtaaatcctttaaaacccgcagccagatcccgcaatctctcaaatgccgctgtcgcgctgtcttttgctcctattttaacggttaaagacgcaggcagacccgctaattgggtttgcaccttttgaatgacggcactggctccgtcttcagctgaaatagagatcatttgtgcgcccagctttcttttcatagagcgctggatgcggtcaattgttcttaaaacagatttactctctttgcgtatatcaatttcactttggcgttttgtcattttcctgtatttctcaagcgctctgaagccattttggattttccttattttctttgaaacccgatcttccaattcaaaacgggcggtcagctttgccatgatgtcgctccccctttcttcgcttgtttttcaagaatgtccagcttgtaaccgattaaaccgtacaacagcgccttaaaatgtctcggtgcttcatataactctttcagttctgatggagaataatgaagctcatgcatcgcgtaatagagatacacggcttccttattcccatcttttatcagttttttgcttcttgctccagatcttctaattcatcttcaaaaccattgatctcaatcgctttattcagccaatttgcatactcaccgccgactgaaagcacgcgttttgccacctcgaccggatctgccgttttgtaagcgtcgcgaagctccttagaccggaaatcagggtaaatcgtagattcaaccgcgatccgcgcatagaagcgctggctgtctaagtcttttacgcggcctctgcccttcacatttttatatgtcgtgctttccttctccagttcatcaatgcgctcagtcgtaatggctttaaaaataaaaggcacgatgtttccttttttatcgacaaaacgctttgaaagcggaacccgaatctcctcagcctcgactgttttacccggcataaagaatgatagatcaaatacttgttcgtttttttcgctcatgatgaaaactcccttactctttttttataaaaaacaggcctgtaaaaaggcctgtttcactcataccgatcttaattaaaacgtttcagaaagcttttccggcacatcgaaatcttcaaaggtaaacggcacttcttcttcgagtgcttctgagtctacgtccaggccggcgatttttgcagaatcaaagttgacgtcatacagagtgacgcgttctgttccgcggccagatgatttgtcatcaagaacggcttgcagcgtaaaatacgggtcgctgccttttttgacgtaatccatcataaggacggcgaatttggatgtgaccttatagaatgttgccgtgcccgttccgttggcgcctgttgttttatgtcccgtcatgcggcggcccatgatgtttacttctgatttgtttttttccacgtttgcttcaaaggttttaatatgcgccatctcttctccgtcgagaaataaacggccttcttttcctgaaatcgtgttttgcgcttttaatgccatcttagtttacctccacgttaaagtagaatttttctgccgcatccacaggctgtacggcgagatcgattaaaaagccgtcgcggtcttcattcagcccgattgcaatgtctttgtctgaatcaaagttggcgatgccgcccgcatcctgaagcgtagtcaaatattgaatgatcatcgttttaacgaattgaaggccgtcatttgtcgcaggaagatcgctgcccgtgccttttttcgatttaattaaggctttcagttcacgtgtcaaatcgttattcaccgcatcaagcacacggacgattttgtttttcgcgaactttttgtttttctctgccgtaaatgtcaccaatgagttgatatctttttcaacgctgactgacttatcacgggcatcataagagaaaaggaattcacctttggaaagacgttcgattacttcatcatgagtcaggcggtgcagcacatcgacggcgccttcgtattcaacgaatgttaaggattgattaaatgcggcgctggcacttgcgcctgccacccaggcggtcgcatcttcagctttaatctcggttccgtcttccagcagcacaccttcagtcacattgataataccttcataatctccgctgtaatgggcggtcaccccttgcactttctgtccctgcgcatcgcgaaggcgtttaatgaatgcggcaaatgtcgctttcagctgatcgttttccgcgacaggaagagcgatgacatcgaaattctccgtttcagccgcagctaaaaaatccgtatagtctgagttgaccggtgctttatcagttccgcccgcaagacggatgcctgcctgcgggtttaacgtttccccggattcttcctcagtgcctgtcagcgggatggaagccgacagttcgcccgttcccgtgaatgtgacatagccgtttgcttttaattcttcggcttttttcaccgtttgtttgtcaacttccgcttcatccatgtaagtggtcacgtcgaaagcgttctgatcaaggacgttttcactgatgcggatgatgatgtcatttccttttgaaccgccgtacaaagcggttgctttaacaccttgcgaaagatcggcgctcgctctgattccctctgtcagacggtacatcaaaacggtttttgctttctttttcgcctcacgaagcagaatcagtgacggatcttcaatactgagccccacttttttattcaaatcttcaatgcttgaaatggaaacgaatgttttcgcttccccccagcttgatgcgacgggaagggcgacaatcccgcgttcaccgatcgatacccgctcctgggcggttgttttaaaattaaaatagatcccggcacgttctttttcttttccttgtgtaaatgttccgccgttcattattgcatgacctccttggttaaaaatgcttcaatgtaagacttggcttgcgcttttgtcatttgtttttgcttcacgccgaataaagccccctggagaatctcaggttttacgccgaaaagctccttcgcgtgctttgttaaatccgccgtgtcataaagaaccgctcgttccgccgctgcggcgtttttctttttatgttgtttcacttttctttcaccccgctgttaatgtccacatcccgcagtgcgggagatgtttgtttctgatagtagtagcggctcgtccagcggattgtgatcactgcctcgcctttgtctccgactcttgtttcgatacggctgatgcggacgaaatcaccggtgtcctcccctgattccgtaagcagcggaatcagctgtcttgattctctcaccgcatcggcgatccggtcggctgcatagagcgcctgcaccgagtcggcatggaacagcttcacattcagactgtatgtcttcttaaaggtggagactgtgtcattctcgtcaaaaacatacgggggcggaatgtatagtgacggcacctgaaattgttcaggcagttcattttcatatacgggcacgccgcactgctgatacaaaaaagcggcgattgaaccggtttcgcgattcatccgatatctccccccaacgtgttaagccactgatcgaaacgcttgtccagcgattctgcgaagagtgtttcatacaaaagaagggctttgtcccaaaacccattcccgctgatccattgttttttgagcgccattcccgttgaagctgacggatcatggatgaaccgggagccttgaaaatacccgggcacccatctgacattttcatctgagacggtccaatgtccgtcatttatgaatgaggcatactctacattggtgccgatttcaagggtcagtcccccgttttcaatgatccatacatgatcctgcgctccttttcggaaagaagacagcaggccttctgtatcaatccctcccgaatgaataagctcctcccgtaccaagtcgagaaaatcctctcctgactgttccagccattcgcctgcctgacgggcaaattctccggatgatgccttttgcagcgaccgattccattgttcaaggttttttatgctcatagtctgtcatctctcacagcgataacctcccaatggtgctgtcttgctttcttcggcatttccagaatatacgcctggccttcccaaatgattttgtcattgacacgcacaatggcctctttcggaaaatgaatgagaaaccgctgatatactttatgatcaggctcaagctgaataagctgctgctgtttttcaacaaacagacacggcacgtcttcagcatccggaacttccggataagaaaagacaggctggagcttttcggcgggaatcccgaagcgcccggccttcggaactgacaccgtctcatgataaatatcgcatctgtcagtgagcagccgttcgtagctcataaaggtctcacctttgcgtgtgcagaaaccggggaataacccggcgcgatatattcacagagcagatggtgcaccgccggttttctgattccgccttcatctgccaccgtatacgagtagtcgcctatcttttcagattgataggcggaagcggccgcttcattctggttgatcagcgcaaaatattgagaaagctttaataacgcaagcttaattttttcgggaagcggtgagtatataggatcagtaaacgaatgccccgccattctggccgcttccgcctccgcctccagaatgtcctgtataagaagcggctccggcctgtttttgacttgatcataaactgaatataaaacaacgtcagacggctgaattaacataactgccacccccgtcttattctttaacgtttacgattttggcgcttgcatcttcttcttcaaatttgctgtcaagtttagccgtcagtacgataataaatttgcggctgcgaatatctttatctacttcgattcggatatttcgtgaaaaaccgagaatgatatttttcgggtgagtcagaatgatgtcagacgcatcgtactgggaatcaccttctccgaccgagtaaggctgcagattggacactcctttgaccggaacgccgaatgctgaagacaaaccgccctgcaccgcaagatcccccaggttggtctgacggtcagctacacggtctttccattcaatctccatgccttgagatgtgtaaaatctgaattcctgaggcaggcgcaaatattttgcaggaatggcttttaagccttttttaaatgtggctctggacagctcttccccgtttccgtcaatgacgtgagatacagtctgcttacggattccgtcaagctgtgccaagtacggatcagaagaagatgtatcgccgtttacgacaagctcctcaatatcgactgccgcccgctccgccaaaatctgcatgatcgtctgctgcaggccgtctttttcaatattgttttcaagcgtgtcataggtgatattaatttccgcaatgacttctttcgtattcagctgcaccgtacttgttgccgggacggtcagctgatcgtcagttaaggcttttccttcctcagcggcacgcagaatacgctggccgaaaccgattttttcaaatttctgcgagtcattttccatttgaatcacacgcgattcgctgaaaatggtcggcgtgttctgcaccatgcggataaatgctgaagcttgtgcggggttcattaaaccgccgctttttaaagcggaaagtgacatttccgcctttctgataatatcttgatttctcactctacagttcctccttctgactgggcttaaagcagtccgctccaaatggattttttaacaggctcttggccgcccgtctcttcttccggctgctttgatgcgcctcttactttttcaagcgcttcaatgcgtttaataatcggtgcgagcatgtcctcaacaagcgttttcagcttctcttcatcagacggcgcagccgccccgtctttgtcttgcgtgttttggtccaagctgtcaagccgctttaaaagcgggtgcagcgcgtgttcaatcgattctcttacgtcttcttttctcatcttgttcaagtcctctcccttgcggtttcttgatttgcggtcacggtcgagaaattgcttgaccgcgccgaataagccggcttgcttttctgccggctcttcgtaaacgtcagcggttcccgccatgctgtagcccgtaatgataccggctttaatctgatcccatacttcatcggaagctttggtgacaagcacccaagatcctttccggatcacagcattcccgatttcaaagtcatccggggcgacgtacgactccaccacctcgccggtcccgccttcaaaattatgatttgtatcgatgttgcgggcatccgccaaaaaaccgtgagcggccttttcaatctcttcagccgtcatataatcgccatgggcatccgggacatccggctcgtaaacgatgccgtaaacaagcttctgttcatccgattcactttttgtaaacacctgcacctttttttcaaatgacggaaggcctccggctgattttgtaaaaaagaattccgtttggttcgccgccttatcgacatagctcacaaaactgatgacggcatttctcaattctctcggcacgagatgttttcaccccctttcaggattgctcctttttccctttcagcaccggccggctgtagtactcttcaggccactcctcaagcgtcttcccgagcactcttccggccagatcacggaggtcattaggagagaccgcgccggcggaaataaatggcgtaagcaccttcgcaatttcaagcggatcgcgaaaatcaggcccttttaatgtgagctgtacatcgtggagacccaattctggcaaaaataacgtgttgagcttattaatcagcgttttccgctccggctgaaacacctgctcctccgttattttccgtgccgtatcggcggtggctttgttgtattcctgcgcctcgcccgtataaagcggcgggagacggaacgcggagcggagtttatttctgcttttgtcgtcatattcaagaaacagcgcatcatcctgcagaatttcggcaagtgatttaatttccacagacacgggcgtaatgtcttcgcctccgtgaaggtctttttccttcgcaataccttccgcctcaatcagcagaaacttgtgggcgttttccactccctccaggtcattcatataatcctggagctctttgtacgaggtttctgacagcatgccgttttcaaccgtaatggcggccggcacgtgacggccctgcttgaaatacataaaattcagttcttccgctttccgggcgccgtacagattgacgatattgccgacccagcgcggaattccgtaagtgccgctgccgatttttaagtgaatcgcttcatttgcccggtattcttcagacagggtctttacgtattcgccggttctcatgtccatcatgcggggatcgccgtattccttaaaaaacactttccgaccgttcagcatctgaacatatttacggaaccgtttttgccttttaatcgttttggatgcgccgttttcttcatatgaaaatgtaacttcaacgggatcagtcacaccgcagacgcgcatatgtttcacatccaaatattcaatccccgccggttttcctgccccgtcccgaagcacttcgagaaaaccgttgcccgttttttcgcggtcttctatcgcatatccgaggaccgtctcggccgattcatcaaaatgaagacatttgtaaaagctctccagcttcatccagtttttttcggcccgggccttttttggcggggagcaatctgggctatttacatcaaaggtatattccacatcaaacccaaaacccgtaatattgacccgatacgcgtcaatgcactgctgaagaatcgtcgaatattcggcgattgttttcagttcaatgagattatagggcggtgaaatgatgtcttcgccgtacagatcggcaaattgatcttcgttcatctgccttgcctgcggcgcggccatttttgatttaaagacggtggctctaacgttttgatagttcggcaacgcctacctcctcctttcccgattcggacgtctccgtttttgtgatgcatctttcaaatccgccgcgtcatagtcatccagcgcataccaaatggctgaaagtgtgtggggatcaattgaaaactcatcttccgacagaacgccgtttttgttttttgcgtacgttaagttctgcaattcgcggatcgtatgttgacagctgtctgagcaatagatatgtttgaaccgtttcagcttttttgtatactgaagtcttgagcccggaaactttttggccgcaaccatccaaaagccctgcctgcggaaatattggatgcttttcggctcagccgaatccgctttgatcagctctttttgatccgccaattcctgaagctcctcagctgtctgatcatcggtcattttgtttttgtaatattcccagaaaatataaaggtctttttgatccggatcgacggcaagccggatgaccgcattgtatgactcttcaaaaccgaaatccatgcccgtccgaaacagggggcgcctgatggaagcaatccgctccgttacttcgttgtgctccatgacctgaaactgcggaaacacgcggatgccattgacgccgaactgtcctttgcgggcgatccggtacaaatcaggatcgtaatgccgtaagctgtccagctgcttaatatagcttttcggcaaaaacagattatcgcacgctgtggaatggtggtaatacgtatctcccttaacgacggtgcctttttcatacagcgtctgatcatccaatacgaaccgttttttttggtcatcacggaaaaaatgccggtacgtccaattggaggtgccgacgggatttgtggtgcatatcatatgaagcgaaagctcgggatggcgcagacgcccgatcagctccttaaatccttcatacttcacttcagagcattcttcaatccaaatcagtgaaatatgatgaatggatttcaatttggccgggttgtccatccctttaaacataatccggcttccgtttgaaaatctcagctgcatcggcgaagacacggcctttacggcatgtcccagctcaagctccccgataatatcttcaaacaaggcaaaagtagaatctctgtgcgtatcgaaaacttcccgcacgacaagcgccgtccgcttttcacgaagcagcttcaggatgattttcagcgcggtatgatagctttttgacgagccatagcctccgacgagaaattggtacgtttcattccaattgaacaaataatcttcaaagcgcgggttaaccgctttttcaatcatgaccgttcctctttccgcgtaatgacaatgtcaatcggcttttggctgtcttctgttttttccatcttctgctgtgccagctttaatttttcattttcgattttttgtttaaattgatcggggaaaaggtcaaagtacaaggacagcttttcaagagccttcatcttgtcggcaagcttgattgcaatgccctcttttccgagttttgcttctgtgacgatggttccgtccagaaggtgcgaatctttaacatcaacgtagctgatttcctgcataatcggattatcattttcgtcaaagagcggccctgattttccgaaggcctgaacctctttttttccgaaggttacataatcagtaatgtcggcgaaagcgattttcacatagacttgaagaacgtccatcgcttcgacaaacactttattgaccatttcctttttcatgcggctgatttctttggcgactttttcgttttttaacagcctgcttcccgtcacatgcgcgctttccggtgaatacccggcttttatcgcagattgggtggcgttaaagcttttcacataataaagacaaaacagccgctggcgttcgtttaactcatcaccttcgcccggggtgttttttccgccgctttccgcgttcttatggagcgcctcgtcccagcgcccttcttttttccatctgccgatcgttcttgcggatacgcctgatttgccggcaagggcgcgatttgtgatgcggcctttatgagactgatagattgtaaatgcctgttctctttttgcgtttttcatgctacggcatcaccgccacctccgacatgattgtctataataaaaagcggcttctaatcgggccgctttttgtgatcgtctgttcacttctaggtggcaaacgtatgacaacttatgaagcaggcgattgatttctttgttcctgctgtttttgaatttttagaagcgcccgtttgaccgtcgtctgtacggttgatttctttacattcagcaaggcggcgatccgttcatatgaaaagcattccgctttgtggagcagcagcatttctttttctctatccgttaaaacggctaatgcgtcccgcagtctgattctgtcttcttcagtcacatttgcggaaggttcaaacatcagcgcctgcgaataggtttctatgattctaggatctttaatcagcattctctgataagcgtctctgcggtctatcgctcttcttatgccgggctgccggcctttttcaagccattcgatgacatattccacatctgtaatgatcgttctgatgatttttttatctttcagttcttctgaagtaagcatcgtttcatcggcttcctccagctgcttgtaccactttttcgtctctttcagcgtgcgtttatattcaaatagtaagtcttccatgtagatcctcctctttttcggaacaaaaaaaggacaccaaccaatgcgcagcatgtacgcgattgatcagtgtccgcaggctttccgtcttggacgtattctgtttttaattcaatttaaagccgatttcatattcgatccgggccagatccccttttcgcgtttcgacaagcgttttgccgtgctccggcgcttcggcgagccatgcttccttcttcagtccgtctacaataatcacccgaaccttgccttcttccagctggctttttaatgttgtatgttcaatgtcagtcagttttttaggattcatgttttacgtcctccgtctttttcaggatgtttacttcatgtatgagactttcgagcttatttatgaacgcttctttttcttcagaactttctccccggagcaggcggagagccgtttcggccgcctcaaaaagttccggggctttcgccatcaatgccgcgttgatctgctgtgagtatgaacttaagttgaaaacggccgcgatgagccttccgtttgaataagggaacttctctttatccgcttcgctgtaagcggaataaatgtaaatgggtttttcttctccgctgtgtacggcccgccatggagcgggactgtgtttttcttgcaatggttatcctcactttccatcagcctcatgccatgcttcaatttgcttttctatccgtttcgccctgaacagcaggcaaaaaagccatttgatatatttatacacgtgcatcaagcctcgcttttgcgtcttgaaccattcgctcaagacgtttaatgaccggcgttaaatcagtgcctgttttgcagttcgggcaagggtgaaagacagcgccgaaacccgtttccgtcataatgaccttcttcggcccgcacagcttacacattatctcgccccctctaatctgtggtttacatcaaatgaattgccattaatgatgactaaataatcgctgcacatctcataaattcttgtgcctaaggcttcatcaacctgcaccagtccgtcacaggccagctcgctcgagataagaaccggcttatgatttaaatagcggtaattcacgacggcgtacatttgttcaatctgccaatcggtcgcccggggttttccgttcagcggtttgaacagatcgtcaataaaaagcacatccgcctgtttcatacggccaagctttgcatcaagcagatcaaaatcattttttaaatccgtaaagccctccacaaaaggaaaatacagcaccggtgtctgcttctgtctcatgacataattgctgagagcagtcaaaagatgggtttttcccgaccccggacgccctaaaagggcaatgctgtttttccggcagtttttaatcttgtcgaagttttcaacatattcaagggcgcactcatatgcgtcgacgactgcctgaggcttgccccgcgtgataaatcctttgaaatccagcttccgaaaggcatctgtaatctcacttgcgctgaggatgcgctctgcttttcgttcggcggcgcagcggcacttaacccacacatccattcccagctggtttttgagataaccgccctgatctttacagagcggacagtcaaagcggctttcgtctgattcttccggtctgtccgccagtaatggacgttttccgtttttcaggtcggccagtatctgctcgatcgttcgttttgtcatgtatcgtattcctctctttttttgttgtgattgtccttcccgcaattcgtgcattcaagcggtcttccatatacttggcgcaatagctgaaagccttgatcgtttcagctgaagaggtgcgccgctgttcaaaagcggtaaagcattcgccgagccatttgattgcttcttgtgctgacgcaccgagggaaacaatacgggcgatggcctgataatcccggggcgacgggtatacgctccgcccctcctgtgcagaccttaatctgataaaatgggcggcaatgtcgttaatcgcttcttcagcagtatgattttttgttatatctatttctctccggacatttttgtcccggtgatccgccgatattgtccggtctgtgacttccgggcgggtcaatgtctttttctgcgtgaatcttttcgagtgctttacggagacgatgagtccgtaaggggcgcggacggttttgatatattcatgctgttccaaaacctcaagccaccgtctgacggttttttcgctgacggcaaatacatcggccatttcttttgcttttaagggcttatgtccgaggacgatcccccactttacgccgtcttttacatgttcctttgtcgttgagctgatgaaccataaaaacagccatatggcggaccctattttgtcataatgttctgaattcaataatccggaataaatgaaaaacgggtagcttttacgattcatattggacgtctccgtttgtcttcagacttatatagcgttcatactgcaatcggttatcaaatcggaataccggtagtccgcaagcggtaaaagatatcgaaccgcctgcttttcctaaacatctctgatcagccggattgctgctgaaacggatgattatcggctgcatctctcaccctcctgatcaatttcttatcgtaatttgatacattttgtatccttatgatgttgattatatacgatacagttcgtatcatcaagacctttttgatactttttttatcatctctttattttgatacattttgtatctataatcataagtaacttagggtgttgaaaaaagagaggtcattcggatgataggcggaagattaaagagtctcagaggaaagaaaacgcaggaagaagtcgcaaatcatatcggtgtctcgcgcgccagatattctcattatgaaaacggccgatctgaacccgattacgacacgctgcaaaagcttgcggattatttcaaagtgtcgactgattatttgttaaccggaaaagaaccttcagatgaagacatgtttgccgatcccgacctgcagatcgcatatcgggacatgcaggacttttccccggaaagcaagcagcaggccattgaattcattaattatttaaaagaaaaagagaaaaaccgcaggccgaaacataaataatccgctcttttcctttaaactgcttaacgttcagccgatataaaagctgaatgtttatttttaaaagaaaagggaattgattcaaagtccgatcagggcttttctttctcgcttaaaaaagaacatatgttcgaaagggtgtattcaattgggcgattttttaacacatcttgaggaatacgtcaaaaacttatattgccgcatgggaatgaccgcccctctccatattgatatgcagatgattgccaaggagcttgacatttggattcattttgaagatacgcacagtatgatgctgaagcgggacggcatgtacagcatcgtcctgaatcaaaaaaagtcacccgaagagcaatggcaggattttgcgcacgaactgtgccatgtgctgaagcataccggcaaccattttcatatgaacaagctgttcagggaactgcaggaatttcaggccaaccattttatgtaccacttctgtgtgccgacctttatgctgttaaacatggagcttccccagcggaggagccacgccgtcattttaatcgcagccgctttccgggtgacggcatcatttgcggaaaaaaggctggagctgtttgaacggcgtaaagcaggtattcaatttcagaagcggctcacttgtctgttatccgacaagcggccgaatgggtattatgaaagcggacagacacacttgcatgccgctgaggaaaaaacgccgtattttattgaaaattagcgattctccgccggcagagtgtcagcattttaaatcgcaggaaaggtttttgcatcatgacgctgttctcaccgtgctgcccgccaagcacttcttgcgccgcatagctccagtgaatgtaagaacgggcccccctgttcatttatcataaaaaccggccttcacggcttctacataccgaaaaaacagatcggttggcgtatatttttctccccggcagccaaaattgctgaacagcgcgtgtctctgcgccgtgctcacttccaattgcagccccattttcctttttgtccgattgacaatgttgccgggatttacacctgccagccgatcattcttctctgtcagctcggcatcaaaccccgcttcacgcagcagatcacaaatcagtcttgctttttccagatccgcgcccccgacgagtgtatttgcctttttcagatcatgatacccgtgaaaagccaatgcgtaatgatgggcggtcactttttctaaagccaggggttcgtcaaagcgtgtgcttgtcaaatggagagaacggttatcgcaccgcttcgttccttcaaataaataaattgagctttggtcagaaaatgcccgcaccagctcactgactcccggctcaatcctgccgccgtggggagcgaggacgatacatttacttccctctttttcttcataaataattctgtattctgattcagcagctgaaagggctgcgaaattgtcatatctatctttcatgtgtaacatgctctccttttccagtcagcaccagtttactctactcatctgggaatggaaacctttttatagtatgatttgatagaatacgtaacaggggggatatatcatggggttcatcaatggattgctgggcaatgcgtcaacaatatcgacggctgaagcaaaagcagaactggcccgtattctgctggaaggtgagaatgtcaacgccgcatttaagcttgtccgagatatcattgtctttacggataagcgtcttatccttgttgataaacagggactcacggggaagaaaacggagattcaatccattccgtacaagagcatttccagattcagcgtagaaaccgccggccgctttgaccttgattcagagctgaaaatttggatttcaggcgcggaacttcccgctgtctcaaagcagtttaaaaaagatgaaagcatttatgatattcaaaaggcccttgccgcagtttgtatgtaagaagaaacggaagcccggggagcttccgttttattgattacagtttttcttctattttcaccttcgttttcgggccgtaaattccgtctgccgttaatccgctgacggattgaaaacgttttatagcatttgccgttttcgggccgtaaacgccgtccgccccatgattttttgctcctttatcgggataaaaataaagagcggataaagcgttttgcacttgttttacgtttgtccctttcgtcagcggtttcgtcactttgatcacaccggatggaagcggataggaagacacagcctgactttttgaagaagaacccgtctgagcgagcttgatcacttgtccgactgtaatgtgattcggatcggtgatatggttgatgctttgcagcgattttacgctgacaccgtgcgatgcggcgatttccgataaggtgtcgccttttttcacatggtattcagacgcggaagaagaaatagaggcttttttcgccggcatactcccgcttaatttcttttcaatcttcgccttcacttcatcccagcggccttcagacaaaatgcggtgcgggcagtactttccgttccagtcctgatgctttctgattctgtcaatcccccagccccgttctttcaaaagctgcgccgcaaacgcaatcgccagttcttctgcggctctgtaccgttcgccgcctgacttactgtaacagatttctatagcaatcgactttcggtttccggtaccgttcgtgccgtctcccgaatgccaggcattccggtccaacggaattccctggatcacttctttgtcatcaaccgcaaaatgatagctcgttgattcgctgttccccgtcatatagctgatttcattagcggcggatgcgtcgtttgccgtgttatgaatggtaatatactccggtgtcatcggattcggacattttaacgcatatttatcagccgatacgagccgttttttcacttcaatccccactcttcatctctccttatgcctttttcatcaataggtggcattcgtaggacagataacttgagcatatagaccccgcattcggataaaaatggaatggatacgcatgcaaaaaataagacccttccaaagaagggtctttatgttatgtttggttgcgcgcggcaatatggaatgtgccgtccgcttggttttccaaatggctttcatggccgatcacctgtgtaaagctgaacccgacagcaacaagcagcaatcctgacaacagtttagatttcatatagacaatctcctctctggatttgtttttgggcgtgcaccattttttcataaaacgtgagcgctttttcaggctgtccgtgtttcatgtaaaatttggcagcgtcatgcgccaattcttccacatacggatacagcatgtgttcttccagaaaatcaaacgtgtgcctgacggatgcgttatccatttccttgccgtataacgcatgtaaaaattggaacagattcacaaacaattcatcattgtattcgcgggcgatactgagcccgaggcgatattgcttctctgcttcggctgtagtgttctgtttataaagaacctgtgttaatgagtaaatagaatgcggaagattatcgaacttttctgacctgcaaatggaaacggatgtctcaaaatattcggctgctttagagaggtctcccattttttcgtaacagtttccgagattatataaggctgaactgataagacggggattgccttcttgttttgcaagatctaaagcaagttctaagtggggcaatgctctttctggatactgcatgtcatcataattccctgcaataacgaattcacattggattctgcggacgttgtacgtctcatacgattggtacgtttcaagggcttgaacggcataactcatggagacgtaggtttgtttcaggttgtaaaatatctcggccattttaaaagcaaactcagctttctcgatgtcatcagaaacgagtgcaaggtttttttcagcccgtttgtaatacatcatggcgtttaggaacattttctgtttaaattcgtacattcctcgaaaaaaattaaagtagtaatcaagcagtcctgtcagtttatactggttgccttcaatgtcttccaataattctgaaaactcaggctgagaagggtcctcctttaagggcttgatgtaatccagcatgacacggtgtctgaattccattaatgaataatacagcagcagatcctgatcttcttccatatcctcgatctctctctctacttcacgtttgacgcgctccgcctcaaggacgtgaaactgccggatatgggtataccattcattaattttgagcccgacaaaagaggacggaatagtctgcttcatcctcaataaatccccccttttggaatgaccgagatatgtcatattttatcatatttgctagaaaaagaagaacgcaaaaagaccgcaattgtcgaatttcggatatccgcaacgatttatctccgtcacaagcttattgcttgtttcttccgtgccgttgatatagcatatccttgcagcttttattctgtattaaatgggggttttcacatgacagcacaaaatcaattggtcagccactttctgtcacatcgaaacgtgacgattgaactggcggaaaaaatcagccgcgagcattacgactacaaaccggcagagacatcaatgtccgctcaggaacttgtaaaacacatcgtttattcttttcttatgtttgcaaacgtcattaacgacggaaacggatcagccatccagaacaaaccgaaagaagaagcggaaacagacctcgtcaaactggcggaagcatgtactgaaaaaacgacagacatcctgtcacagctgactgaagagcagctgaaccgcgaaattgacctgaccgcctctttcggcagaaaagtaaccggcgcggctctccttcagcttgccatggagcatgaaattcatcataaaggcaatcttttcgtgtatgtcagagaaatgggccacacggaacttccgttttatcagcaaaaatcataatccggccatccgccggtctgcgacataacagcaggctggcggattttttgttctgtataaaattttccgaaaatttaattgattaccgcctcttaatcatatataatctgataaaaatagtaggattattcaggaggcacacagatgactgtaagcattgtgtttatgggtttctttgtcggaacgctggtcggattgacgggtgtgggaggagcggcgcttttaactcctttactgatcgttttggggatcaacccctcaatcgccgtcggcactgaccttttatataactccatcaccaaactgttcggtgtcgtttctcattggaagcagcgcaccgttcaatttaaacttgtcggctatttggcgctcgggagcattcccagcgcaacagccgccatcggtgttcttcacttgtttcccgcttttcaccagcatcaggagcagattatcaaacaggcgctcggctacgtactgacccttgtcgccatttccattatcgcccgcctttttttcgataaaaaactgcggccgaaccgctggcagcaaaaaacgcttgaagaaaagcggacactcatgatactgatcggcgtcattttcggcttcatcgtcggcctgacatctattgggtccggctcattatttgcgatcgccatgttatacctgttcagaatgaaaacggcagaagtagtgggaacggatatcgcacatgcctttctgctcgtaacggctgccggtctgttaaacgcaagcttcggaagcgtcgattacctgcttgtattgaatctgttgatcggctctgtgccgggtgtgcttctcggcagcttcttttcgccgaaattctcaccgcgcccgctgcagtttgtgatggcggcgattattttaatcagcggaataaaattaatataaaaaaggcggtctgttgtcagatcgccttttcccttataacgtcacaccggacttaaagattgcaagctcccgaaaatcgtttttttcgttattgacgaattctccgcttgcaactttaataatgtattgaataaaatctcttataatgtgatcttctgttgtttggtcttccgccaatctgcccgcgttgtaatcaatccaatgaggctttgattgaaataaatcggtatttgttgatactttcacagtcgggacaaatgtgccgaacggcgtgcctcttccggttgtaaacaaaacgatgtgacagcccgccgcggcgagcgctgaagaagcgattaaatcattgccgggcgcactgagcagtgtcaatccctttgttttcagtgtttcaccgtatgtcagcacatcagaaaccggtgcaagaccggctttttgggtgcagccgagcgacttgtcttcgagcgttgaaatgccgccttccttattccctggtgacgggttttcataaatcggctgctcgtgcttcataaaatattgcttgaaatcattgatcaatcggactgttttatgaaacacttcttcactcgccgcacgctgcatgagaatcgtctcagcgccgaacatctcaggcacctccgttaagaccgtgctccctccctgtgcaatcaagtaatctgaaaatctccctaataaagggtttgccgtgatgccggaaaaaccgtccgacccgccgcatttcaatccgatgctcaattctgacagcggaatctcctcacgtttatcttcctttgccgcaaggtgtatctctttaagaagcgcagtccccgcttcaatttcatctgtgacagcctgtgattcgagaaatttcacccgatctccattcacttcagaaagcgcttccctaatcgccgccagctcattattttcacagccgagccctaaaaccagcacaccgcccgcatttggatgacggatggcgttcatcagcatttgtttcgtattctcatgatcatcgccaagctgggagcagccgtattggtgctttaaaaccagcacattgtcaaagggcgcaatgtctttcgcctcttttacgaagcgatgcaggattttctcagcgacgccgtttacgcagccgactgtaggcacgatccacagttcatttcggacgccggatgtaccgttttctcttctgtagcctttaaatgtccggttctcatttgtaaaaggattgttctcgaagcgcggtgaatacgtgtattcttgcacatcggataaattcgtttgcagattatgggtatgaatatgctcgccggccgaaatccgtcttgttgcacgcccgatcgaaaaaccgtatttaatgatgctgccgttttcttcaatggtttgcagcgcgattttatgcccccgctttacagggtccttcacttcaatcgtcagtccgtctgtatgcagccgctcccctttgttaaaatggcgcatggcgagaagcacgttatcgtttttatggatttttatgacctctttcatttcacttccccctttttgccgcagcattcatgtaacgcatgcttcataccccgcttatgaatgacagacagaaaaaaagccgttcgttcagtcagccccggaagatgattcaggttcttcccccacagtcgctcttctcctaatatggcagatgccgcttgaaacatatcatctttgcaacgggaccgcgccatttgaaaacggtgaagaacctcctcgccgtcagccggtttgttcggtccgttccagtatgaatagatcatggcgctgaacgaaaataccagcttctcaggtagccggccctcctgttcgatataagccttcagcgtcggcaggtttcttgttttgaatttcacggcagcgttaagggtaatgctttgcagataatgttggatataagggtttttaaaccgctgtaacacatctgccgcgtattgggtgacaccctccatttgcagcacagggaggatttcttcattgatcagctcttcgatgaacctgcccgtcacctcgtgctcagccgcttcccggacggtttgcagtccgtatagtaaagccactggcgccaatgccgtatgagcgccgtttaagattctcaccttttttgtcctgtaaggcgtaaggtcagacgtgatcagtgcgttcagcccggcctcagcaaaaggaagctcattctgaagctgttccggcccttctatcacccacaaataataatgctcaccaaccacaagcagacggtcttcgtacccgagaaaattggtaagttcttctacggtatcaacagggaatccgggaacaatccgatccacgagggtattgcagaagatgttcgcggcatgaatccattgagtaaaatcaggctccagctcccacagcccggcatattgaagcacggcagccttcagtttccgtccgttttcttcgaccagttcacatggaagcacaatgcaccctttctcggcgtcacccgcaaatgccttatagcggaaataaaggaacgccgctaatttcccggggaatgttttttgaggtctatcctcaagccggtcgcctttctcaaacgtaattcccgcttctgtcgtattggaaatgataaaacgaagctcctctagtgctgccagccgtttaaaggaatcatagtcagaaaaaagatcaatgccgcggctgatggatttgacgatcgtgtgttcttcagccggttttccgtcctttatcccctgcaaaaaaagcgtaaacaaaccgtcctgctcgtttaaacgtttgattttctcagagcctctcggctgtacggcgacaacgcttccgttaaaatccgtcaattgattcaattgatcgatctgccagtctgcgaaggcccgcaaaaagttgccttcgccgaactgaaggactttttcaggatattgaatgtattcaccgcacatctttttattcagctgccgcaagctgtccgcctccttctgtattcatgcacacgttaacattttcccgtacgaaaacccggataatcagacgggccgttatgtgagttttttaattgaatctcttatcatcacctcggtgttttcgtatattttttccgccgccgtatccgggtcggcgattagcgccaagatcttctctgcgccgagtatgctgatgttttcaaccgggcgttttactgtcgagagcctcggcgtcatgtattgggaaatgccgatgtcatcaaacccgataacagatatatcttccggaacgttcaggcctttggcgaaaatggcgttcatcgccccgatcgccatatcatcgtttgaacaaaaaacagccgtaggcggtgattgaagcgccaagagtttttccatcgcctgactgccgctttccatatcatagcggccttttacactgtattcatgcttaatcggaatagaatgatcaattaaagatgtcaaatagccttctttccgctgagaagttgacctgaatccttcctttccctcaatgatcgcgatatctctgtgtccgtttgcgatcaggcagtcgaccgcctgtctggagccttctttatcgtttgacaggatattcgtgatgctccggtcatcaatgtcccggttcagtacgacaagcggaatgtttttctcgcggatatgataaataaatgcattatcactgtcgctttggctcattaaaatgattccgtcatatctcatgggcgtaatggtttcaaagcttttcaggtcgtcaatcgcgcggacgaacaaattgtattcctcactgattgtgcggtttacacctttgatggtatcggaaaaaaagctgtgtgaggttccgtttgtgatgcttgtaaaaaacagtccgatcgtatgggacttttgcatggcaaggctttttgcatttacattcggtgtgtaattcagctgtgaagcgagctctaatattttctgttttgtatgctctttaatgtaggggctgccgttaagtgcccgggatacggttgtgtgggatacgttggcgagttttgcgatatcttttatggttaccatcgtttttcctttctttctgtatgctgtcatttatttctattgtaccattaacggacagtccataaaatcactaaagttgaggttttgcatgatgtaagtcctgaacgagctcggcatgctgccggtccgtcagcttatacatcaaaccgataatcagcatggcgcacgctaaagcgaaagccgggtacagcagcagtagccctttaatcccgatcagcgtgccttttgtctgagatgcattcgggatatagccgataacgctcagcccgatgcctgaaagaaaacctgataaagattgggcgagttttctggagaagttgaaaagcgaatatgtcgtcgcctccttccgttcacccgtcttccactctccgtaatcaataatgtccgacacaagcgcccatgtaatgccgtttggtatgctgatcccaataaaagcaatgctcgctaacgccgtaaagatatatacgtttgacgggagacagaaattcagcgcatcagccgcggcgctgacggcaaaaccgatcatcaccgtttgcttttttccgaaacgtttgacgagtttcggcataaacaaaacacctaaaaatgaagaaccgatgatgataaaactcatgtaggacatcagctccgcattgttgagattgtactgggcgaagtaaacaagcatagcggatttaatgttatatgccgatattgagaaaatcgtcatgaaaacgacggtcagaagcggtttgttgccgataaagcatttgaaaaccgacataacggacagcttttctttcggcgcttcacggacgataattctttctttgcagtttcggtagcagatcataaatcccgcgattccgattacggccatcattcccatgactgctgggtagccgatgtgaacgttatcaaaatgaacgagaatcgggatgacgatgacactggtaatgagcagcgcgccgagggagccgatctggcggaatgcggaaagcgccgttctgtcctccgcatcctgtgtaatggccgcgccgagggagccgtacggaatattgacgaaagaataagcgaccccccacagcatgtaagaagcataggcgtacacaagcttccaggtgacgctcacgtccggtgacacaaaaatcaatacggtcatgaccgcaagaataatacttccgaataataagtacggcctgaatttcccacggggtccgatcttttttctgtagtcaatggccgagccgacaatcggatcagtcaaagccgcaaacagcttgctgaccaaaaaaatactgccggcgaacgctgccggaatgcctgcgacatctgtgaaaaacttcagcaaatagatctgcccgagatcaaacataaatccgttcccaaaatctccaaaaccataggatactttttctttcagactcagcttatgctccttcacttttgcggcaggtgctgtcacgacaggcacattactcataggccacctctttcattccatttttaaaagcggaaatattcctcagcattccggtaacaaatcccctcgacaatctttcctaaaagctccatatcgtaaggcgcttcgccttgttccgcccagccgccgatcagcgtgcagacaagccgcctgaagtattcatggcggggataggacaggaaacttcttgaatccgtcagcatcccgataaaacggctgaacaggcccatatttgataacgctttcatttgctggagcattccatctttcgtgtcattgaaccaccaggctgtgccaaattgaattttccccggtgttttcccatcctgaaagctgttgatcatgctggcgataatatagttgtcattcggattcaaagaatacaaaatcgttttaggcaattgccgctttttttcggcggaatctaacagccgggcaagcggttttgcgatacgttcatcattaattgagtcatatcccgtatcaggaccgaggctgctgaacttatttgtattggtatttcttaacgcgttaatatggaactgcatcgcccagtccagttcggcgtaaagaccgcaaagatattgcagcgtccgtgttttgaatttcttttcatcttcaaaagacacatgctctccgcttaatccggctgcaaaaatccgggccgcttcctcctcggtcgtctcggcataaaccatttgatctaacgcatgatccgacactcttcccccggcattgtgaaaaaagcggacgcgggactctaacgcatctaaatacgattggtaggtggtgacagccattccggaagcgctctccagcgaacggacccaatcggcaaaacccgggctgctgatgtccagtcctttgtcaggccgaaatccgggcagcacttgaaccggaaaatcactttctttcaacagttcgtggtatgtcagcgcatcggcaggatcgtcggttgtgcaaatgactttgacatttgatttcagaatgagatcccttgcgccaaacccgtctccctgcaggagctcattcgtttttttccagattgccgcggccgttttttcattcaatacgtcataaatgccgaaccagcgctgcagctctaaatgcgtccagctgtacagcggattgcctatcgccatcggcaccgtttttgcccaggcgaaaaacttctcttcatctgaagcagttccggtaatgcagcgctcttcaatgccgttggccctcatgatccgccacttgtagtggtcaccgtaaagccatgcctccgtaatggttgcgaaggttttattttcatagatttcctttgggcttaagtgacagtgataatcaatgatcggcatgttttcagcgtattcccggtacagctttacggccgttttactatccagtaaaaaatcatcacccataaaaactttcacactttcatcctccctcttaaaaatgttaacgttaacaaaatggttcttttttattttagcttcctcgttctcacatatcaatcatttttatttaacttttcagaaaattgtatatccgttaacattttcatacaaaaaaaagacactgccgagaaagtccggcaatgtcttctgtgtgatcttaaggattagtaagcgagactgaataatcctttgatatgtgttaaataacgtacgttacttgcttctttcattaaagatgccggaagacctttcagcggagtagagttcgctccgatgatggcaaccgcgtctttacgtccgaggcttgcaagcgtaccagagtttacaggcttgaatgtttcaagcgtttttccttctaagtaagcgaacaggttgtaaccgacaagttcacccatctgccaagcgatttgcgctgtcggcgggtacggacggccgtccggcgcaaagtatacagcgctgtctccgacaacgaatacatcttcgtgagaagtagattgtaagaaatcgttaaccgtcgcacggccgcggttcacttcaaggccggattcgccgactaacgggttgccttgtacgccgcctgtccatacaaatgtgttggcaacgacttttgaaccgtctttcagatcaataacgtttccttcaacatttgtaacaggaagacctgttaagaactcaacgccgcgtttttcaagactttttgtcgcgcgctcgataaggtcatcaggaagaacaggaagaattttcggacctgcttctactaatttcagtttgatttctttcggatctacgccgtattttttcgtaaggttcggcatgatgtcagcaagctcaccgacaagctcaacgcctgttaagccgccgccgccgataaggatcgttgcatcagcttcgtttttcgttttagcgtattcacgcacacggtcttccacgtgtttgtatactttgttggcatcagcagcagatttcagcaccatgctgttttcttcaagtccaggaatgccgaaataagccgtaacagaaccaagtccgacaacaagcgcgtcataagtcagcttagaaccgtcagaaagggcaacttctttcttatcaactgagaaagaattgacttctgcgattttaatgtcgacgtcttttcctttcagaagtttttcaagcggcatagcaacagcctgttcagacacgttgcccgctgcaaggcggtgcagttctgtaatgatttggtgagtcgggtatttgttcacaacggttacgcgtgcttcatctttactgtaatgtttgcgaacggttaaagcagaaagaactccgccgtaaccagcgcctaaaatgacaatatgttttgacatcgtatatcctccgtcctttatatcaatttgaatctgagattatttttgtttttcgttcatgatttcaagatagctgttagcaaaacggaacagcttttgagcttgaggatctttcagcatgcgcagcaggccgaaaagtccgatcgtttcattgcttgcatccgcgcggtcttttgcttcgatcgcagtagccgcaacttctttcgctgtttctttcaccggctcaagaatttctgtaagcgcacccactgtatcgctcttcaatacttcgtctgtcgctacagactgtgcaaaatcataagacttcgttaaaatatttactaactcagtcagttttggaagctgatccactaaaacagtcagtgattcttgaacttcaggttttagcagctgatcaataagatcgcgttggccttggctgacagatgcatttgtttgatcgattgtttctggcatatccgattctcctttactataagcagtatgctgatttttttggaaagggtagcctttcccccttcatgcagaaaagcatgaaaaagcaagattgtgaattcatgcacaatcatttacaaaaataaatgtttactacccagtttttcactttgccatatccagtattatttttatatcaacaaaaacaattgaataagtcaaaatttctttttcctctctgaaaatagcaaacataaaaaacccaaatttgatttactcttatataataacactttttgaacaaaatttgaacgtgaattgtttcgtttatgaaattatttatatggcgggggtgtaataacgtttctttcaggctatttttttacagaccatccgcttttcccctgtcatttttcccacaattttaatagcgggcccgtttttcccgtaaaggggtcgcattccgggagcgggacacggctgatttcttctgaagttctatcatttttctccgtttttgtatcgtactgccggccgcccggataagccccgatcacggtaaaatcagaactgcccgacagttttttatgtccggtgccggccggaatgaccgctgcatcccccgtttgaagaacggcgtctgctccttgttccccgccgaacctcaaaaccgcgtttccttttaccgcgacaagaacttcgtgcgtggtgctgtgaaaatggtgatacggaaatactccgcccgtccagctgttcgaccaatcgtgccggcagaggacggactctgctttctgtaccgtttcttcattaaataccgctttataaataacaagcggaagattcgggttattcggaatgcggccgtcatcttcgaaataaagcacttgaatatcctctttctgcactgttttcacctccgtatatgtctgtttcccattcatcatttattaaaacgctattttcccatattccattgcgaagcctgccggtgaatagtatagtataaaaaaatatgtgtcaaaatgagggatttaatgaaagccatcgtgatcggaatattggcatctctgttttttgcagtcacatttattttaaacagggcgatggagctttccggcggaagctggatgtggagctcttccctgcgttttctttttatgattccgtttttatttttgatcgtttatgcgaaaggaaaatgggagccgctctggcatgaaatccggaaaaaaccgtttttctggctgaagtggagttttaccgggttcgtgcttttttatgccccgattacgtttgccgcggcatatgggccgggctggctgatcgcgggcacgtggcagattacaattgtcgcgggtgtgcttctgtcgccgtttttttacgaaacaaaacattcacctgcgggcccggtttccgccagacaaaagatcccgctgatttcactggttacttccgtcatcatcctgatcggagccggtctgattcagcttcagcatgcgggttctctgtccggccgcacgatactattcagcgtggtgccggtcgtcatcgcggcttttgcctatccgctcggcaaccgcaaaatgctggaacaatacggcggaaaactcgatacatttcagcgggtgctcggcatgacgctcgcaagccttccgttttggcttttgatcgccgctttcggctggcatagagacgggcttccgtcaatgggacagacattccaatcttttatcgtcgcactcagctctggcgttatcgcaacagtattatttttccgcgccaccgatatggtgaggaatgagccgcagaagctcgctgctgttgaagcgactcaatccggagaagttctttttgcactgatcggcgaaatcgtctttttatccgcggcgtttccgtcacttctttcatttgccggactgttcattattattgcgggaatggtcatgcatacattcgcttcccggcagacagaccagaaaacggctgagcaaacgtcagccaatcttaccggttcctgatttttttacgaaaggtgtcatcctgtatgaaagaagaaattccggcaatatcttttctgtcagccggcaaacgctttgaacaaaacaatacgtcctttgatgtcctaagccgtgtaaccggacatattcaaaaaggttctatcacggcgttaatagggccttccggcgcgggaaaaagcacattgctgtcgctgtgcaatctgatgaatacgcctgatgaaggggaagtgcttgtattcggaaaagaaataagacactgggacatcagagagctcagaaaaaccgcgggccttgcatttcaatcagctcccgtcctcgagggaacggtgcgggacaaccttctgctcgcagaaaaactccacggcgtacagcactatacccctgaagagctcgcagattttacagatcttccgcgcgggcttctggatcggaatgcaaaagaattatccggcggacagcggcagaagctctcattagcgcgaaccctcgccggactgccgtccatcctgctgctggatgaaatcacctcggcgctggacccgtcatccgttctcatcattgagaaactgatgacgaaactccatcggcaaaaacagctgacgatcctgtggatcacccataaccttgaacaagcggaacgattatccgatacagtatggtttatggctgagggacggcttttagaaaccgcggaaacgaaaacgttctttaaggaaccgaaacatgaaaaggcccgggcgcttttacaagggagcgggtgctgatatgaatgatctttctctgttattgacaagtatatttgtcattatcgctttattcctgtctaaatcttttaaagccggcgtcgaaaaggatatgatcgtcgcaaccgtcagggccgtcattcagcttctcatcatcggctatgtgctgtcgctgatttttcgcggtgatcacccgatatttatcatattaatggtgcttctcatgctcacggccgcttcgcacaatgtcgccaaacggaaaaaaatgcggatcggctcattttggcgcgtttttctgacactggcgatcgcggaaaccgtgacgcagggacttttactgacccttcacatcattccgttcacttcaagatatgtcattccgataagcggcatggtcatcggaaacgccatggtgctctcaagcctgtttttaagccggctcagttcggaagcagacctgcggaaagaagaaatccagctgattctctctctcggaggaacgcctaagcaggccgtccggcagatattgacgtccagtatgaagctcagtatgatcccgacgcttgaaagccagaaaacattgggtctcgttcagcttcccggcatgatgacggggcagattttagcgggggctgatccgatacaggcggtgcgctttcagctgctgatcgtttttacaacgatggcctccgctcttcttacatgtatcatactcagcgccttgacatatccttcccttttcacgaaacactggcaattaaaaaaattcagcagggaagcgtaggcttttttccctgctgaattatttatgataaggtcagagattcatagtaacgggataattcaataatcatcgctcccatccgctcaatgtccggagcaagaaccctctttatcccttcatcccggatcgcttcagccgtcactttgccgactgcggcggcaagcacttgtttttcgaatgcctgctgcaattcttttgtgaaccctttttcttttgcatgatcaaagagagagcgcacttgaatggctgtcgtaaaacatacggcatcgacctctccgtttaacagctctcccagcagtttatcgaccgtctccctttccggcggaatatgctgatacgggagaacagggaatacctccgctccgtttttctcaaggaactccgttaagaccggcgctttttcgccatgaagctgtatcatgacttttttatctttaaagtcaaatcgttccaaggagcggatcagccctcttgttgtaccgtcttcatctgaggcatgcggcgtgatgccgagcttttttaaggccgcatatgttttatagcctctgcagccgattttcgcttcatgaacggccgctaaaaattcttctttcagaccgattttttccgataccgacaataacgtttccgtaccgatgcctgtggtgaatatcgcccagtcggctttttgcccggcaaatgttcttacgtcgggttcaatttgatcctccgccaggtatacggttccttggagggaacggacgaccgctgttccgccctgcttttctattaattttgtgatctcttctgttttccgcgaaccgccgatggcaatccgtttcccgttcaatccttttcccatcgctgttttcttcttcccttcagatgccgggcgccctatggcaggccgtcatttatttctattattgttacgcaatcagccgggaaaatcaagctatgctcccgttgaatcccccgtgcagttgctgtatcattaaccgggcagaacgatttgattcgcggagggattttcaattatggaaacaaaaaaagagttcgagacaaaaggatacgatacttcggtcatttatgagttcaatgaatatcctgatgttcacagcggccgatgtgacaattgcgactatacgctgtttaaaagctcagtgaagggcggaaaatttttgagggaatgccggagatgcggcatgaagaaaaacatataacaaaacaggcagccgtcttccgatgcgctgcctgtttctcaatcaattttcgacggccgccgttttcaaaaattcttcaatggcgcaaacagcctgttttgggccgccggtttcttctattttctgctgcatgcttttcacgcggctgaggatgttcttatcgacgtatacgttctgaacgtctttttgcaaacgggccacagtgacttctttcgggggcagatgcacgccaagccccaattcatccacacgctttgcggtgacctcttgttcgtgcatttgcggaacgacaacgagcgggacacccgcattcatcgcctccattgtactgttcatcccgccgtgagatacaaacagctttgctttctccagcacatcaagctgaggaacgtgctggcggatgataaagtgatcggggacatccgaaaaactttccggatcaattgttgtgccgactgacataataacccgccagtccgagtcccgaaacgcgtcaatacacatccggtaaaattcaggccaggcgttaaacgccgttcccagtgagatgagcataagcggacgatcatcggctgcatcaatttccagacttcccgtatttgtgcgttctccaagagacggacccacaaaacagaatcgttcgtcaaaggtttcctgtttcggctgaaaggcccttggcataaagacaatattcaatttttcaggcatgaaaaactcttccattgtcatccgtttcaattgttcattttcaatctgctcctggtattcttctatcgcctgtttggccgcttccagtgtttcttcgtctcttcctaattgaaaatactcattcattgcatagctcgggcagaactttacggccgggatgccgccattatccgcaaacaattttccggcaagagctaaaaaatcaaacaggacgatgtcaggaaggtcgtctttgtacagctcttccagctgcggaagcacttcaaccgcttcttccagaaacatcacaaacgcgtcatttttgtttacccgatcttttatcgtctccgggtccgcctttatgcttgtgcggtataaaacgggaatggcgcccgttttggcaacggaagcttcaaattcctcagtcgtagcgaatgtcactttatacccgcgattgacaagttcctcggctacaggcagcgtgggattgacatgaccgtgagcggccacattaataatggcgatgtgtgtttttctcatcttttttcttctccctcattttcgtttatctccgcttctaaagactccagcccgtacatgacactgtttcggatcggctcaatccggacgggctcaaggtgtgaaaaggtttttacaattcctttcagcgcggcttccgcttcaagtctggcaagcggagcgcctaagcagaagtgtacgccgaatccgaaggaaaggtgcggattcgattggcgatgaatatcaaatacgcccgccttctcaaatttgttttcatcacggttggcagatgcaacgtagcagagaacgatctccccgcttttcaagcggcgtccgcgcagttcagtgtcgtgccggaccgtccttctgacaaacggagcaggagcgcgaaaacgcagcgtttcttccaccgtttgcgcgatgagagaagggtcctgcttcaattcttcataaaggccgggcgtctctaatatgctgtaaaccgcatttgaaatgagattagtcgttgtttcatttcccgccactaaaagcaggttgcaaaacgggatcagatcttctgccgtgagcttctctccctcttcttcctcttttatcaaaatagaaataatgtcttggccgggctgttttcgtttgctttctattatttccgcaaaaaatgccgccagctctgcctcacatcggtcacgttcctgctgatttttctccgccgcttcaggactcgcatctttcggcatgctgacgagaatgtccgaccattttttaaactgatccatacgttcggacggaacgcctaataattctgaaatcaccatgaccggcaaagggtaagagagatctttaacgatatcaatccgccctttgttctttgcctgtttcaggagatgatcggtaatgtctttaattcgcggttcccattccttcaagacgcggggagtgaaagcgcgattgacggcagatctgatttgggtatgcttcggcgggtccatattcagcatggactttgcaatcgagcttttcacatcagtcatgaggcttgagaacgtctctttatcactgatgacttttttgacatcatcgtataaaaacacactccaaaccttcgtttcttcatcaaagtgtatagggctttcccgtctcattttttcgtaccaaggaaaagggttgtatacgtccaggccgttttttcctttcatcagggttctttggatggcttgtctcgtgctcctcagcttactcatgtttcatcactcctgattgtttcatatttgaatagttgacgtaccttgaattttatcctagcacatattttcaatttttttctattcataacctgaactattaacataacacaacaaaagtcatgaatccggaggtgaaatttctcccaagaaaacagcagaagcgcacaaaaaacccgagccttcggccaggctcgggagaaatgttcactcattcgtctgcggtttctggtgctgcttttggtcttcaggaggctgcgtatttctttccatatcgtccgtatcagcgcccatgcctttcaggaaagaaaacagcagagtgacggccttgttgatttccgggtcttttaaagcgcggacgatatcaaaatacccggtcttcctgccgctgtctttttcctcgacggcctttgtgacgcccgcattgattttaacgataaacggctcaagctgttttacatcgagcatgccgagaacgccgcttaacagcaggagatttttcagcatattggccgtttccggagtattcgccttcttcacgaggatatccatcactttgtctccctggccgaagagcccgcgcagaagcgccaaaacgccgcgctcgttcatgtgctgaagaatgtgcagagattccaaaatcgcgtctttatttcgtaaaagagccgtctcgatctcttctaagtccttttttcgtttgtcttcttctgtgacggtctgttttcggatgccgctgattgctttagccattttgctgtttccccctttttacggcgtctcccggaaatacataatctttacgcgcccatttccgatcaacccggacaccgatctgcggctgcgggtttccgtaacggaaattgattttcggaagcggattaacgccttcttttttcaaaatctccatcttcgctgatgtttctttataagccggtgtatcggtatccttatccgcatagctgcttgttaaaaggttaatggcggcgtcttttgaatcgttcatcggaagatagacttgtttgccttttaccctgtctgtgatgacgcatttgactttcacatttccgtacggtgaagtcagacggacaagcgttccgtcttccagccctctttcttcggcgagttcgggcgagacctcaaggaacacactcggtgttttttcggatattccttttgatcggtaagtcagattcccttcgtgaaaatgctcgagcagcctcccgttattcacatggatatcatattcttcatcaaattctttcggctcggtccactgaacgggatatagaatcgctttgccgtctgaaaacgggaacttatccgtaaataaaagcggtgaatcggttccgtccgctgcaaccggccattgcagtgaattgtagccttcgagacgttcgtaagtgacgcctgcatagagcggcgaaagcattgccgcttcttccataatgtctgccggatgttcatagtgccaatcagcgcccagacggttggcgatgtccgtaatgatctgccaatcaggctttgaatctcccagcggttcaaacacttcgtaaaggcgctgcaccctccgttccgtattcgtaaacgtcccttctttttcaaggctcgggcttgccggaagcacgacatcggcgaactcggccgtacgcgaaagaaagatatcctgcacaacgaagaaatcaagcttttcaaatgcggcatgaacatggttaatattggagtcgacaagtcccatttcttctccttttaagtacatggacttcagttttcctgagtggatgccttcgatcatttcatgatttgtcattccgatttctttcggcaggtctgttccccagccctgttcgtactttttgcgggctttttcatccgttactttttcatagccggggaagctgtcaggcatactgccgaaatcactggcgccctgcacgttattatggccccgaagcggatatgagcctgcgccgggcttgccgtaattcccggtcacaagaagcatgttggaaatggccgtgctcgtatcacttcctccgatatgctgggtgacacccatcgcccacagtgcgcacacgctgccggcttcatgaatcatccgggccactttgattaaggtatccttgtccacaccggtatgtttttccgcatattccattgtataaggttcaaggcttttcacgaattcatctaatccgttcactctctccttcagaaatgcagtatccgccaaatcgtgatcaagcagatatttcgatacggcattcagccagacaatatctgacccggcacgcggctggaaaaacacatcagagcgctcggccatttcatgttttcgcaagtcagcgacgacgagcttctgtccgtgcagcttatgagaacgtttaatgcgtgtggacaggacggggtgagactcagacgtatttgagccgataatcagaacgagctcagctttttctatatctgtaatcgaccctgaatcaccgccgtatccgaccgttctgaacaatccggccgtggcgggagactggcagtagcgtgagcagttgtcgacattatttgtgccgatgacagctcttgcaagcttctgcatcacgtatgattcttcattcgtgcatttggaagatgtgataaaggcaagtgcgtccgggccgaaatgttcttttatatcagtaaatttatcagcgatcagctggagcgcttcatcccattccgcctcccgaaacgagtctccttcccggataagcggtttggtaaggcgcttttcactattgacgaaatcccagccgaatttccctttcacacacgtcgaaatgccatttgctggcgcctcggcctgaggttctacctttaaaatgtctcttcctttcgtccatatatcaaaactgcagccgacaccgcagtatgtgcatacggttttcgtttttttgattctttcatcccgcatggccgattccatgtccgatatggccaaaatcgatccgtatccggtttcgacgccttttgtgatgtcaatcatcggccgaagcgtctcttggttaatgcctgttaaataccccgcttcgccttccatacctttttccattatggcattgcacggacataccgtcgaacaatgtccgcaggaaacacatgatgattcattgatcggcacatcctgatcccaaataacccgcgggcgtttccgctcccaatcaatgcttaacgtttcggttacttgtacgtcctgacaggcttcgacgcagcgtccgcacaaaatgcactgatcgggatcatatcggtaaaacggatttgattcatctttaggatacggtttttgatcgaacggaatgctttgatgattgattttcatttcctttacggtattatgtacttcgcagctcccattgttgtaatcacagaccgtgcagtacaattcatggttgtgcaaaatgttgtccatgccgataatctgcgcttttttcacatcagacgaaagcgtatcgatgacatcgccgtcctttatttgcgcggaacacgaacgcaccagttccccgttaacattgacgatgcaggtatcgcacgtttcaatcgggccgagactcggatgataacacacatgcggcacgtcaattgaactattattcaaaagctgcaaaacggtttgaccgtccggcgcttccatttcaaccccattgattgtaaccttctttgtatcagccattttcttttcccctttctgtacccctctatacatcctctatgattcccaaccggcctttcactaaaacatctcgtttatctcaggaaacatacgggtatgagcggtaaaaaggaggcgttcacatatgttgaagaaaaaaacactcgccacgggattgtcggcagtgatgctcacgggatgcgcattcggcgcagaagcattttcagatacacagcccgtccatgccgcagccgcttcaaaaacggaaaaccagcgtgcacaagaactggtgaacagcctttaccaatcggcgtttaaaggggaaatgccgcaaaatgtgaaaggcctgaaaatcaaccaaagcacaagacaggacgtttacgataaaatcggcgagccggaacaaaaagcagacagccgcaatccatttgatttatacagctggaacatgggaaaccccggttatggattttcctatcataaaaacggaaaaatctcggaaatacgctatttcggaacaggggtcgagcggcgcttaaacctcggcggcgtcacacctgacgtcttaatcaaacaaatcggcagcgctgacaaaatcctgacagtgccaaaaacgggcgaaacagattacgtctaccatacggggcagtatgagctccgcttcgtcatcggcagtgatcaaaaagcagaccatgtcagcttaaaagcaagataacgcgaaaaaagcggcctcccgggccgtttttttcatagacagcttctccgtcgttccttacaatacatgggagtacaaaaaaaggggaacagtgtgaagtgaatagacatccattgacatacggaatatgtaccgtttttatcatcgccctcggtttgctgtccagaaccgcatacatcaccgccctattgcccggcatcataaacgcttatttaggagatgccttgtgggcggcaatgatttttacaggattcgggcttttatttcggcacatccggacggaaacagccgctatcctgagcctatcgttttgctgtctgattgaatgcagccagctgtatcacgcgccgtggattgacgcaatcagaagcagcacgctcggcgggctgatcctcggctggcaatttgtctggagtgacattttcgcctataccctcggggtatgcgctgccgcatttttagaatgggccgtaaaaagaaaccgccagtccccttcataatcggagcacgccgccgatatgaagggataaggaggtggaagctatggatacccctgcgttatcaatcgctatgcaccaggcatctctggcgcagaatgtaaatatcgctttaacaaaaacggtcatgcagcatgcacaggctgcggcggaagaaacagtgaaaatgctgccgtcccagcacccgactgccggccattcaattgatgtgaaagtgtaaaaaaagatgccggatgataaccggcgtcttttttttgcccgttgtacgtacaccataccgggcatacaggaataaggtaaacggaaccaacatttgaaaaggaggttttcctcttgtacgatcctttctaccatgaagacacagccgagagccacgaacgggtgccatatcattatccgcggccgccttattatttccccagaccatatccatactacccgcggccgccttattatttccccagaccgtatccatactatccgcggccgtatatcccgttctatccctggtattaatgtttgaaaagaaatgaccgcagacaggaggcttcccctgtctgctattcaactttgaccgacagaatatacgggagagcttgaactttttccattaccgccgctttcccgcttttgcttttcacccttcccttcacttcaagcaccgccttattcaattcataggacgtaataagaattcctttttcctcaagagaagttaaaatatcatgcatgacggctttctcctcaatcctgaaactgacagacaaagaatgtgccgccggtttaaacagaaaatttaacagttcaagcccgattaacgccaaaatcgtgccgctgatgccaatgacatacatacctgccccgatcgtcagcccgatccccgacgtagcccaaatccccgcggccgtcgtaagcccccgcacgacatgccgctgcaaaataatcgtgccggctcctaaaaatccgacgccgctgacgacctgcgccgccacccggctcggatcaaaggacgtatggctgttggataacaaatcaaaaaagccgtatttggaaacgatcatcatcaaggcgctgccgacggccactaaaaaatgcgtcctcaaaccggcttccttcgccctgaattctctctccaatccaataagagccccaagcagacccgcaaccgccagacgaatcacaaaatcaagttccatccgtctctctcctttccttatcttcttacccgcttttacaacccaatcatgcggtgtatcttttttaaaatgcaccgactaattgacataaggaggttttatgaaatatattctgtggttttttatattattgttatttagcttatttattttgggaggatataaagcatccgtttctcacccggatttcccggtgccattattcgctatgcacagcaaaacaaaggaatatgaaaaaggaaaatacgtttcaaactatacataccgtttcgcaaaagaagaagaaggtccgagcggtttataccaattggaaatagccgaaaaaggctggaaacttaaagggcaggaaggacttatcaaaacctatgaaaagcgaggagaacgtgtttcactttttttcggcacgggggaaataagcgtcattgaagaatgatccttctcaaaaggcggctgaaatccgcaaacggcatatctttttaaacttcctttatctctgcgaatctataaattcagccaatatctcaattaaggaacacctttctgatccaaaaaatgccgcctttaatgagaaaatcattatacaaaaacaaaagcgcaactgaaaaagaataagcatccataaaaaagccctctttttaaaaagagggctggctaaataggactttttctaccttcaacactgtaaaccctattattaagaacagctgttgaaatattttgcaaagctcctaaatttttttgcgattccacctatccaaagcagaaccattttctaaatatattcatttagaactccttctgttatgtccttgaaccacttctttagtttgaccgccaactaaagaatccccccatcaaaaacttcggtttctgttggatatattaatagggagcgtttttttaacacccaaagtttgggatagagtatcaaaagatcttacataaagatcacactcaatccaactgcatctctcaaacagaatgtccggcaatcacctcaaaaaacgaggtgaagtctgtcagtatcccgtcagccgccagctgtttttcttcaaatagcgcgcgttttttcccaagcgggtcaatggccataatcttgcctgcacctgctttttttgccgctgtgagccccgaaaaggcatcttcaatgactaagcatccttcaggtctgaggcctaacttttccgatgcgatgagaaaaatatccggcgccggttttccggggaagctcccgtcatcaaacgtgactttgtcaaaatcaaaccaccgatccaactgaaagacgtcaaagtaaaactcgacattttcctttaccgtagccgtggcaatggtcattggcgtttctgattttttcagatggttcaatacaccggtcagtcctttcgtcagctttaactcatctttgttttcaaggcataattctctgtagtaggcttctttttcaaaagacagcttctcgatttcttcatttgttaaatcgccggaaataaaatacgtcaggatttcactgtttgttctcccgtgaatgttcacgaaaatgtcttcatcagaaatggttttcggcgcgtattttttcaccatgaaaaaccatgctttttcgtgcagatgcgaatcttgaaacatcgtgccgttgaaatcaaaaataacccctttcatcgaaccgcccgcctttttatttttttgcgattttgacatctacatattgctcgtaatgaatttgaacatctttcatcactttatcatccgtaatcagatagtccatatcgtgcaagttatagaacacgtaaaaatcttcccggttgaattttttattatccgccagcaaaaatttcgtccgcgaattattcagcgcgatttgatgagcctccccttcttcaatgctgtaagaagaaatctcatcattatgtatgccgttggcgctgatgaaggctttcgtaaaattgaatttctgcagattgccgttcacgatgggcccgacgaaggcaccggtattttttcggaaatcgccgccaatcaggatggtatccgcagtgtcaccatgttttaaaatatcaaatacgggatagttgtttgtgataatcctgattcgcttatgcagcaagtgtttggctaaaagttcaatcgtcgtgccgggccctaaaaaaacggtatcgccgtcatttacatatgaagctgcgagttccgcgatcttctccttctcctccatttgaacacccagtttttcattatgcgataattcgtgatcaatggaataagatatgctctgtgcgcctccgtgaatacgtacgatttttccggccttatccagctcgtccagatctcttctcactgtcatatcagaaactgccaattcatcgataatatcactcaccgtaataaacccccgcgagtttacgatatcgatgatttttaaaagacgttctttttttaacatgttcaatcatcccctcaactttacacacaatctaacacaccacggcaatccggtcaacaaaaacaaacactaacaaacaacataatcaacatataaaacaacgaaaaacttataaaacccctattaaaacagattttatttctttatgaagctattgacaacaaaaatgtatgcgtttactattaaacaaaagataacaattacaaacattaacaaacttcaattcacacattggcgaaggaggattcagtaatgctcaaattacctcatgactttattttcggcggggcgactgcggcatatcaagcggaaggcgccacaaaagaaggcggcaaagggcctgtggcctgggatgaatttcttgaaaaacagggaagattcagccctgatccggcaagtgatttttaccgccagtttccggaagatattaaactatgtgaaaaattcggaataaacggcatccgcctttctatagcctggacgagaattttccctgacggcacgggcaaaatcaatcaggaaggtgttgattactatcatcgtattttctcagagtgccataaacgcaacgtcaccccttttgtcacgctgcatcatttcgatacaccgaaaggattgtttgatcagggagactttctcaaccgcgctgcgatagaagcgtttgtcagctatgcggagttttgctttaaagaattcagcgaaatcagatattggagcacgtttaacgaaatttatcccacagccaccaaccagtatttactcggggttttcccgccatctattaaaggtgatatcacaaaagtcattcaatgcctccatcacatgatggtagcgcatgcgatgaccgtcaatctttttaaagacggcggttatccgggagaaatcggtgtcgtccactcattggaaacaaaatatcccgccagtgactcagaagaagaccgccatgcctgttttctggatgacgcgttatccgtgagattcctcctcgacgccacctaccttggctattattctgaggaaaccatgcgggctctggatgaaatctgtgaggcaaacggcgcttcatacgagttttcagacagtgactttgacgtgatgaaaaaagcttcgacgcgcaatgattatctcggcatcaatcattatcaatgccatttcgtcaaagcgtacgacggagaaaccgttattcaccataacggaacgggcgataagggcacttcagtctataaagtaaaaggaatcggcgaaagaatttacaaagaaggcctgaagcggaccgattgggactggctcatctatcctgaaggcatgtatgacatgctgatgcgcatcaaacgggactatccgcaatataacaaaatttacattaccgaaaacggcatgggctataaagatgagtttgaagacggcatcattatggataaggcaagaatcgactatttaaaagtctatttagaagccgtcagtaaagcgattaccgacggagtcaatgtaaaggggtatttcttatggtccttaatggatttattttcatggaccaacggctacaacaaacgttacggtcttttttacgtcgacttcgacacccaaaaacggtatccgaaagaatcggcctactggtacaaacttgtaagtgaaacaaaaacaatcatttaacgatcatacatggtgaaaagagtctcttttcatcatgtgtgccgtctttaggaggttttttcatgacaaaggaagaattgcagatgctcggttttgaaatcgtcgcctatgccggcgacgccagaagcactttattgaaagtcctgaaagaagtccgtgccggaaacttcgaaaacacggaagcagcattgaaaagcgccgatgaaaatttaaccctcgcccacaatgcgcaaacgaaaatgttagctgaagaagctgacggcaaggacatggaattagggtttattttcgttcacggtcaggaccacttgatgacaacccttttgctccgtgatcttattcaggattttatagaactctaccgaagccgccgataaggagtggaaaaatgaacggtatcatcaagcaaatcgaaaagggaaaaccgttttttgaaaaaatctcaagaaacatttatttaggcgcgatccgcgacggcttcttaacggccatgcctgttattttattcgccagcatttttatcctcaccgccgctgtgccggaagtgttgggtttcacttggcctaaaagtgtttctgaatggctttggaaagtttataactattcaatgggcgccctcggtctgatcgttgcggcaacaagtgcgaaatgcctgagtgaatcaatgaaccgaaaaatgccgaaaaacaaagggatcaaccccgtttcagcgatgcttgcttcagtcgtcgggtttctcattttaagcgtcactcaaatcgacggcggattctccacggaatacctcggcacaaaaggtcttttagccgcttttgtatccgctttcataacagtgaacgtttacagattctgcgtgctgaaaaatattacgattaaaatgcctaaagaagtaccgggtaccatttcacaaacatttaaagatgtttttccgttcgctttttccgtgctggccatggtaatcattgatttactgatcaggaatacgctgaacgtatcttttgcagaggctctctcctctctcttatcgccattttttaccgccgcagacggttatctggggatttgtgtcatttggggaatgatggcgctgttctggtttgtcggcgttcacgggccttctattgtggagccggccatcgcagctattatttacgcaaatgtagaggcgaaccttcagcttcataatgccggtgagcaggcgtccaacgtgctgaccgtcggactcgggaacttcgtcggcacaatgggagggaccggcgcaacccttgttgttccgtttatctttcttcttttcgcgaaatccaagcaattgaaagcagtcggaaaagcatccgcggttccggtgtctttcgcagtaaacgaacctctgctctttgctgcgccgatcattttaaatccttattttttcattccgtttgttgtaacgccgatggtgaatgtctgtctgtttaaatttttcgtggatgtcatcggaatgaacagttttatgtatgttcttccgtgggccaccccggcgcccgccggcttgattctcggaaccggcatggggctctcggcttttgtgctgacggctgtattaatcattgtcgatttcctgatatacctgccattctgcaaagcttatgacaaagtattagcggcgaaagaagcccaacacaccgagcctgaaagcgcgccgcaaacattacagcccgccatggccggcgcctcagaagacgcggcctccgtcatcagcacaaattttcaggaatcctcatccgccttggaacacggcaccaatgtgttagtgctgtgcgccggagcgggaacgagcgccatgcttgcgaacgcactgacagaaggagccgaagaatacaacgtgccgattaccgcctcagcaggcgcctacggatcccattacgacatcatgaaagacttcgatatgatcattttggctccgcaggtcggctcttattatgatgacattaaagaagatgcggaccgcctgcatgtgaaactcatcgcaacgaaaggagcggaatatatcagtctcacaagaaattcacaaaaagccattcagttcatactggagcatacctcaaaatagaatcggaggtttatcatggatgccaaacttttgaaatcaagattcgaagacattttccagagaagtaacggggaactgtttttcgcacccggccggatcaacctgatcggggaacatacggattatataggcggccacgttctcccctgcgcgattacgatcggaacttatgccgtatgcgcaaaacgcgaagatcatcagatccggttatactcagaaaactttcctgacagcggcattgtctgtcttgatctttccgccacagcatacaaaaaagaagacggctgggccaattatccgaaggggatgatccattaccttcttgaagccggcggccaaatagacagcggaatggatattctttttcacggtacgattccaaacggagccggtttaagctcctccgcttctattgaaatgttaaccggttccattttaagaaagttattcagcctggatgtttcagatactgaactggcgcttatcggaaaaagagtcgaaaatgaatttatcggcgtgaattcaggcattatggatcaattcgcagtgcaaaaaggcaaaaagaacatggccattctgttaaactgcgataagcttgagcacgaaatgattccggctgcttttaacggatataaaatcgtcattatgaatacgaacaagcgccgggagctggcggcttcaaaatataatgaacgccgcagcgaatgcgacgcagctctttcagaactgcggcaatatcggaatatcgcatcacttgcggaattgacggcagaagacttcaacgaactcgaatcccttctctcctgtgaaacgttgcgtaaaagagcccggcacgcggtcaacgaaaacgagcggaccctctcagctgcggaggctctcaaatcgaatgatttgaaaacgttcggcgagctgatgaatgcgtcccaccgttcgttacgcgatgattacgaagtgaccggtgacgaattagacgcgctcgctgaagcagcctggaaagaaggagcgctcggagcgcggatgacgggcgcggggttcggcggctgcgccatagccattgtggaaagtgaagaaaccgccggctttacccgggccgtttcatctcactatcgcagcaggacaggacttgaagcttctttctacatcgcggatataagcgatggcgcggctgaatggagggaaaaataaatcatggcgattctcgttctcggcggagccggctatatcggttctcatgcggttgatcaattattaaacaaaggattgaaaacgatagctgttgatcatctgcagacaggccaccggaaagctgttcatgaaaaagcagttttttactatggagatatccgtgacaaaccgtttcttcgctctgtgtttgcgaaggaaaacgtaacaggcgttctccattttgccgctcaatctcttgtcggcgaatcaatgaaagaccctctttcatatttcaataataatgtgtacggtacgcaaattacgctggaggtcatgcaggaattcggagtcaaacacattgtgttttcttcatccgccgctgtatacggcgaacctgaaaaagtgcccatcacagaagacatgccggaaaagccggaaagcgcatacggcgaatcaaaactcatggcagaaaaaatgctgaagtggtgtgaaaccgcctgcggcataaaatatgtctcgcttcggtattttaacgttgccggcgcgaaaacggacggttccatcggagaagatcatcatccggaaacccaccttatccctatccttttacaaaccgcgctcggtcagcgcgaggaggttttgatattcggcactgactatgatacaaaagacggcacgtgcatccgcgattatgtccatgtttccgatttaatcgatgcccatattctcgctctggaatatttgcaaaacggcggagacagcggcattttcaatttaggatcaagcagcgggttttccgtatcagaaatggcggaagcggcccggcaagtgaccgaaagagacataaaagtaagagcggccgcaagaagacccggtgatccaagcactctcatcgcttccagcgataaagcgcggaatattctgggctggaatccgaaacaaacggacatatcggaaatcattgcgtcagcatggaattggcatcggcaacatccaaacggatacaaggacaaatgaaatggaggcggcggtcattgaagtttttgaatcagtggcagggtttctgaaagaaagcactgtcttaggcgacataaatgaaacggatgtgatttatacaagaaacagacttctcgatctgctcggactgacggattatgcagaaccgaaacatatcaagaaacaaaacaggctttactatttggatgaaatggtgaaagacgcggtaaaacggtcaatcattaacgatacgccggctgaaagagacatgctgggaagcagaatcatggacgtgatcacaccggccccttctctgatcaatgccgcattcagcaaattgttatcagattgtccgaaaaaagcaacagattatttttatagattgagtcaaaacaacgactatattaagacgcgggccattcgaaaaaatatcgtgtaccgctcaccaacaccttttggagaattggacatcaccattaatttatcaaagcccgaaaaagatcctaaagacatcgccgcggtaaaaaacagtccggaaaaccggtatccgacatgcctgctctgtatggaaaacgaggggtatcccggaacaccgcatcaccctgcccgttcaaaccaccgcatcatcagacttgacttagcgggagaacagtggggttttcaatactctccttatgcgtattacagcgagcatgccatctttctttcaagcgtgcacaagccgatgaacatcagccgcggcagcttcagaaggcttctggccattacggaaatcttcccgcattatttcgcgggatcaaacgcagacttgccgatcgtaggaggctccattctttctcacgatcattatcaaggcggcgcccatgagtttccgatggcaaaagcgggttccctctacccttttcatatgcgtcattttccagacgttcaggccgaagccgtgaagtggccggtatcagtgatccgccttcgcgcaaaagatccggatttgctgacagatgccgctgcgtatgtttttaaaaagtggcgggaatattcagacgaaaccgtcagcatcatcgcaaagacaaatgaaccccataataccgtcaccccaattgccagacgcaggggaacggatttcgaaatcgatctcgctctcagaaacaaccgcacctccgaagattatccggatggcatttttcacccgcatcaagatgtccatcacatcaaaaaagaaaatatcggtctgattgaagtgatggggctcgccgttttacctccccgcctgaaagatgagctggcagaagtgaaaaagtatttactgaatgaacctcatgacatcaaagacattcatcttccgtgggctgaaaacatcaaagcggatgaagacgtgacaccggaaaatgcagccgctgttttacaaaaagaaaccgcgaatgtatttttacgcgcgctgaccgatgcaggcgtttttaaaatgacacccgaaggaattcaggcgtttcagcgtttcacgacgttattggagaatggcagctgaaacattcagagtgaaatcaatcaacaatcttttttatcaggaggtattgtgatgttaaaaaaccgattgaaacgtgtatttgtaaacgcaatctgtctttctctcattttcactgcttttacattctttgagaagtctcctaaagcaaaagcggatgccccgtttgcctatggcgctgatataggatggctgaaacaaatggaggacgaaggtgtgcgctggctggatgacggcggaaaacagaaagatgccttgcagattcttaaagatcacggaataaatgccgtgagactgagagtgtttgtgaatccgccaagcagctattattggctgaaagacggcacaacatggaccatgctcggctatagtgacaaagcgggcgtacttgcggcggccaaaagggcaaaagcgttaggaatgaaggtaatggttgacttccattacagtgatgtgttcgctgatcccggccaccagatcaagccgaacaaatggaccggctattcaaacagccagctgcaggcagccgtgtataaccatacgtacgatgtcatgaaagaacttaaaaatcacggcatctcccctgattgggtgcaagtagggaatgaaatgaattcaggaattttactgcccgacggcagcacgaacgatttcagcaaattgaccgccttactgaacaaaggctatgacgccgtgaaatccgtcagcccagccaccaaggtcatcagccatttggcacacggcacggacaacagcctattcagatggtggtttgatcaattctttaaaaacggaggaaaaaccgacatcatcggcgtttcgttctatccctattgggaaggtaagccgtactgggagctcaccagccatttatcatctaatttgaatgacatcgcctcacgctacaacaaggaagtcatggtggttgaactgggcggagatgaaaataatccgaaagattcctactggaccataaaagacaccataaaactggtgaaagccgttccgaacggcaaaggaatcggcgtattttactgggaacccgaagctcactccagcgttctgtcagacgcgtatccattaggcgcaaccgccaaagtgtctaaaaacgtcttgaaatacacaaccgcaattgacgcttttcatgacgccgcaataggaaaatgattgatgcgaatctcaagcaggctcattgcgcagcctgcttttttataaggctgtagtgttggcctgttatgaaacagagcaagtaacgaatacggaaagaaaaatactcgaaaacccacgtttcggttaaaaagccgctttttaaatagaatacttcttctatccccctccttcttaatttctgcgcactatctctcagttcctaaataataactttacgattgttgaaaaagaaacaaaaattttataatattgtgtaagcaccaccgagcaggaggacgggccatggacaaaaaagaacagctcctcacggatttcagggacttttttaacaagatggtgtggctgaataggctgaagatggaagaaagccttaaggggcataaaccttctgaagtgcattgcatcgaattcatcgaaaaaattgaagacgccaatgtgactaaacttgcggagtccctttatatgacaagaggcgccataagtaaattaacgaagaagcttatcaataaaggccttatcgaaagctatcagaagccgcttaacaagaaagaaatctatttcaggcttactgagcaaggaaaagtcatttataaaattcacgaggaattgcacaaagagtttcaagaacgggacaaaatcgtgtttgaacaagtaaccgatgaacaatttgacacgatgctgaacttcgtggaaacatacagcaggcatttggattcagaaataaagaaacttggtgcagacatgaaatcggaataaatatgaataaaaccatagcagcccttctccatgaaaacgggctgcctttttatatccctcttattgttgacaaagaaacaaaatcactctattattttgttgacaaggaaacaaagacagcaattttgagaggagaatactatgtcaacacataaaagaaaggaacttcgggtgccaaaagaagttctcacagccgcctgggcaattgcactgggagcaatcgctccaatgcttgactctacgatggtaaacatcgccatcgacaaactgaccaaagacttcaacacgacattggataccattcagtggtccgttacaggctatgtcttagcacttgcgattgcagtacccgtatccggctggcttatgaataaatataacggtaagaaaatcttcatcggctcagtcatcgcctttggtgtcatttctgtttttgcgggaatgagccgtgacgtttccagcttcatcttcttccgtttgcttcaaggattcagcgccggcattatgactccgcttatgtcaacactcttggttaaaacggcaggtccggaaaacctgggaaaagtgatggcaatcgtcagcacccctatgatcttcggcccgatcttaggacctgtcatcggaggcttcatcgtccaaggcgcttcatggcattggattttttacatcaacgtgttcatcgttttgattgctgcaccgcttatgatgaaaaccattccagactttgaaccattcaacaaagatcgtaaactcgatattttcgggattatcaatttgtcattaatgagcgcggcattgatgtacggtattacgaaagcggcggatcatgcatcatttaacaatagcgacaccattttatggacgggcatcggtcttgtttcagcagccatttatcttgtatataatctgattaagaaaaaccaaaccgtgctgcctatgaatttgtttgcaaacaagagcttcttatcatcttcgatcgggttgttcttagcgaatgttgccatcatggggccgatgttaatacttccgctgttttttcaaaacattcgtcatttcacggcagtcggagcagcactcgctttaatccctcaaggagtcggaatgctcgtgactcgtccgctgatcggaaaattgattgataagatcggtgcgaaatacgtggttacggtcagtcttgttctttcgctgatcggatctattccgcttatttttatcaccgataacacaagtatgatttggatttccgtcgtattatttatccgcggcactagttttggaggaattatgctcccattaatgagtgacgcttatacaggccttgacagcaaacagcttccggaagcaggtgtcggtattcatatgattgaaaacctcggttccagctttgggtcagctgtgatcgcaaccgttaccgcaactgtcatacaaggattgcagccaacgattccgaacagtttaaaaggctaccatgccggattcttagtatccgtcatcatccttgcggccatcttcattccaagtctgttccttacccataaaaagactgcgatataaagaactttttaaagtaaaaaacccttgcacagcaagggttttagtgaatgaaactgatgattgttgccggcagagtcagccaacaacagacaaagccttttactcagtcacattgcttttcattaaccactctatttccgttaattcttgtttttgaacgtcttttgtatgttttttcgtaaaatggactttaacagcttcttcgttttcccaaatctcccaaagcatgattttgcgttctgatggttcgagcggataagcatggaactgaatacagccttcttctttgttcgtttcttcctcaagttttttgaattccttcattatttcattaaggtctttatcactgatgatttttaagcatgccgttatgtaatgcatcgaaattccccctcttcccatctttttatggctttacattataacatttatcgaaaaacgaaaccggcataccgcattctcaacaaaccgtccataaaaaatgaacggcaatgtttatttaagagcattaagagcgacttttgcagtctcagcgataagagcattattataactggcatcttccgtaaaccggtttgacaggattgccaaaacaattggggctctgtcaggcggccaaacgatcgcaatgtcgtttcgcgtcccgtaacttccggctccggatttatcgccgacttcccatcctgcaggagcgcctgcacgaatcagttcatcgccggtagcgttgccccgcatccaatccgttaagatcgtgcgcttgtcagtcgtgagagtgttacccaaagcgaaagtcttaaggtcagttgccagtgcttttgcggtgcttgagtcacgacgatccccgggaatcgccgagtttaaatccgtctcgaatcgatcagcttttgttacatgatccccgatctgtttcagtgatttttcgaaacctttagggccgccaagctgctgcagcaataggttcccggcggtattatcgctgtaacggacagcggcttctgagatttctttcagactcatacctgtatccaggtgtttttctgtgattggagaatatgtaactaaatcgtctttgctgtagcggatgatggcattaagtttttcatttgagcttttcttcagaacagcagctgcggccagaactttataggttgatgcgtaagcaaaccgttcattcggtcgataagcaattgtcttgtttgaacctgtatcaatcgcataaaccccaagccgggcatcaaattttttctcaagctgaacaaatttctgattcgttatacagcttgtcatttttgtgttttctatagacttcgcttcagcattcgctgagccgaataaaggattgaaaccggtaaagcttaaacataaaagtccaatgcatagtccaacttgtattcccgctttatttttcacattcaggcctcctcattaaaatgattttgtatacatcttctaattaacattacaaacaggatgaaagtcaatatatttcctttgaatgattaaatcttgtattctgttcctccccttatttgcgcttaaatgcgccgcccttgccgcgtctgaatgtttgcatgtccgcttcgtgatcatcatctatttgttatccctccgtgcaaataaaaacggacaccagtcagagcacagtaatgctgtgcaatgatcagtgtccgcaggctttccgtcttggacctatatatgtttctcttgcagactataaaaatcataaggtaagttaacaaacgcattactttaatctcgccagtcaaaaaattatatcattttatatatttcaataagattattatctggatctctgaaatgagccactcgtgcacgccattcctgacgatcatgtggttcattgacgcatttaatcccttgcttgtgcagatagtcatacgttttatcaacatcttctaccttaaattgaagcaaaaatcttgattgcgcatctccgtctaaagattttctttcttctccaactatttcagccatattttctcgagataaaagttctattttcgtttctccattatcgaaaagtgcatattccatttccttctctaaccaacttattggaagtcctaatgaatctttgtaaaactcgacgcttttcttaaaatcattaaccaatagtctaatttgcaacaacttcatattgaacgcctcctatcattttactggccattcatttaatcatacaatagggacctgacagcattatgtcaagtttccgtaaattttttccatactgcacccaaatttctgatgaaagccttcggagattcatgaaactgcgtttgatcaattcacattcttagtttgaattctcctcctctccaccgtggaggctccggccatgtaagtcgcgcatccgtaaacatccggccgccgctcctgtaagtaatacagctgatagaatgattgactgaatagttttcaccgtcattgcttcccctgctttttatattctgcgatttccttaggggtagcctttcggactccgtctgtgtctgtcctgtttgccacttgaacgccttccatgttttttatctcgctgactactcccaaatgctctaaatacacatgatcaccaatcttgaaacgattcagtttggcccactcctcggtcatgctcctgtattcagtcgcggctttcatttttaattcagccagacacatttgacaaagggttactgttacagaattgccgttaaaatcagtaaacgaaaccgctctgacagattccttttccgggtgcatcgtgcatgttttcttcataggtgatggccgtgtaaattcaatcattccgcttcctcctcaaaaaaagtcttttcgtccctctcacataactccggatgaacggaagttccatgcacccgcattcaaaccgtcacaatacatggagatttgcctttcgccgtctgacggattttcatacatccttcatagctgtaagcttatattcctttatattcccaatgcttgccgctcttccctgttaggatgaagtttctaaagctgttgaccagtttccgcatgttggttccatgcgaaaagccgtatcccaattcatacgggtgaatttcagccatctaatatgtgtgtatgctttgtaaaggaggtgcatcacatgatgttctaacaaccgattcaacttaaacaaagtgattcagtcgacaaaaagattgccaggagcaataagaacggtgaatttaaaaacaattgatcttactgaatatgaattgctagtcaacgcgtattccaaattaataagataaataaaaatagaccccttcacagttaatggtgagggggttatttagtaagtggccgatattttttattgaactccaaatgtctgcatctcaatagtgtctgcagatatactttttctagtttgaaatatttaagcacggataaggtaacaactgaataaacgaagagatgcaaagatggattgaagaggtgatgattttgccgccatgttaatgtacaaatatctaattaaaaagggaaagaattaaataaattaaataaggggttagattgtttcaaattaaaaactgtgagggttcttgatgaggagctgtagagaagaatcataaagtacttgcttaattcagattcttcgattttgtaagtaccctgcaagaaccattttcttttgtcaccttctccgcacctttttattcacacccagcaactcgagcaaggttgtcttcttccaaagttattaaagaagagatgtgttttttggaataactacaaaacgcactggccaaaaaggccttgtatgatggcacgccaatacattctcggttttaaaacttttttacttttatttttccacttaatacttcatcgtgatgctctgctttatttttcacctttatcattaaaataagaaaaccacattaaacttatgaacccatcagttcctataattgtagatataatgtaaggtccaattaagtaaattcataagctttctcccctaagaaaaattcagatccctctaaataaaattcgtattttataaagacattatcctcttaatagaggtcatatcagttatttgtattgataataaacgcccttcttgttaagcttttcaataacttcgtctttgaatggtatatctccgagaattgcatatctaactgtataattacctgctaggatatcctgaaaagacagattggattgtattttcttggtttctgcttcccgttggcgtctaaagagtaaactccttctgtattctttaaagtcgtttatttcgcatttattcacttttacaaaatgtttaattaatcgtaccattttttccttactcaaatacatttgcgtgaaaccaaagtgatgaaaagcatgacagtttgcacaaattaaatttaacccaattaatttaacaacaatattttcaaagtcgtagtgttcaatctcatgaaggtgaagattccgcataacgtcttcctgaggggaaaatccgcaaatactacacacaggggtatcctcttgtaacatacgatccctgattctatgccaaagtgattgacctattgctacccttacagttctaccatgaaataaagaaggtcttgcatcaattttcagcttgtagcctaagtatttatccatatgtctccctttaaaacaattatttaatttcgatgtcaaaaatttggattccaagcaaattcaatgttgccttctgttcttacaactaaatctttgcataatctctccttgttgaccttattttctttgcagttgaaatattgagcttgtgcaataaagttatcattacttgacattataaactttttacggtcaccccttcttccatattccttgaaaatatctataaatataacatctgccggcatcttaccatactttttatcgtgtgtaatctccggaaaattttctaaatttctaactttgtttatgatttgttcaatgttctttttcacatgatttcggcgcttggtatttttcatatagacctcaagtttaaaccgttttaaactgtttgtgcttgtatctttaatatttttaacaatatactcttcttttttaatatcatgataataacactgcaaagtataatcttcgctaactgtattatcttctttaaaattcaaaccaaaaagactgtttccactaattttacgaactaaggactgtgcatatactttgttttgaataaatgcaataatatctgccgtttcagtaagtaaaaaagaattaatttgtttatcgttattaaatgtaaggaatagcctctctgaatcaggataaagtatagctaatttaatgaaggtaaagataccgaattgcaccaattcatcattcgaaggaattacatcagtagaaaaatagaggttgacttggttgattacatcatctatgtccaaaagatggcatcttaaattataggtagacatctcaaattttatccaggattgaaaaacaatatcggttttatttaaaccaacagcctgaacaatacccttataattcttcacattaaattttataatgccggccagtataccattaaccaaatcaattattttgtatatctttctcctgaattgcgaaacacttacttccttactttggggcttacccccggtattaaagttaaagataattgtacctttctcttttagatatgtccctccatgattaatggcatttctaatatctacatcaatttcctctgttaaaattgtacacccttttgatttaagtaagtttactaagggtcctagattattttggcttaacaagtctttctcatctatagtgttaagcaaatttctaagaaatttatatagattcccgattactccttcaactaacgaattatataatggcaaatacttgacttgaatttcaatgtctctaggtattattgttttattaaataaattcagcgtattcagtacacgatcatatgatgaaaggctaaaaaaaaagtgaccaagactttctctgaaactttcaaaaaacaaaatagtgctatcattcttatattttacttcatcaattaaattgtaaataaaatctttaatatctttatcccaaaactttttttcctcatgaaatattaaatcataaattaaaggaagccatgttttgggtatatactgaagctcctcaatatcttcttctattctttccatgtacccctttaaaactaattcactatcaaaacccataaaatctaatgactcaaatgccgtttcaatgtattcacggttcaactattttctctccccattccttattccaaaagtatgcgaacttgcaccttctttatcatgttctgtcttatcccttatttgctccctatattccctttgtatttcatcttttttcttgtccatcttacttgacccctttcaaaataaagtaaagcccaagcaattctgaattatttttattcctttcttttgactcttaatttaatccattcttcatcatcagattatggttttttggttgttctttaccactcgttaaaatgagcaactaactgaaccattattttcttagctcgtcctttagaacccatgcctaattgcgtaaattttgctgtttagcggatctccatccccaggcttatcaaactgtattagagcaatgtagtagctcctcattctatgccaaaaagtctatagagccgccaaaatgatctcgatagtggttaacataaatttaggtttaaaccccttggattttaaataagcaggaattgcttaagtgccaaattcttgtcctatttgacctttttccttaagcacacactataacgatacttcactcactttgtatacaattttcatcctttaatgctctgctttattttcacttttgttattaagataagaaaaccacaataaacatatgaacccagcggctcctataattgtagatataatgtaagtccaattaagtaaatccataagctttctcctctaaaaaaattccaatacgtctaaataaaataattatttcataaccgtaaggaattttaacattttatgttttttcctgattaataaattctttattcttcctcaaatttatttattctgcttaacattctcctatcatttttcgaagctctcttcagcgatcttttctcatatgatgtccctttagtaatcacaacaaaatcagaattattttgcacataaacttgggagtcagatgattcatagtaacccgtaacattttctaaaaccgtcttggaattgtctttatgatatagatcatagttgaccggcggcctgctgattgcaaatttcccaaaaacagcaacatcatccttaccgggagtatggctcgctcctttaataaatatgacgctaaatattaaaatcaaaaaaattgcaattaaagttcctgcaaacataattttttcatttcttttccagttcaacataaacaacccttttctttatcatgccgtgttgatataagtaaatctcacaatttatgtactaacatataaatgtttagatcaagccgcttccattcaacatacttaaatcgctgctgataaatgtcttccaggattgatgcccattcaccccagccttccgcaacaacaatgtttttttctatctatcctcaatccattcacttcaaagttgctcactcttctgaaattgtacaatatttgaagataagggaagaactgatgaatataaaaaggtatttttatttagagctcagttacttaacccacaactttctgtacaagaatagagtcccaaacccaaaagatcagagcaaataataagcagaataaatatatctcataactcgctagtatagaccctattggattataagattcaaagagaacggccatgattagccatgtaacaaatgaagatactgtgtatattaagagatattttaaattgaaccttctaggttttcggtttaagataagctgcaatggcaattcaaaaattaaataacatgtcaacatgatcccgctaattataagataaggaacatattcagcttgatgcagggtgatcacatataccagtgtagaacatatggccgacaaaataaggacagctaggtatcttactaccatcaaatctatctcccccttacgattaaaaaacaaacatgcttgcaattgctatttttcgtaataataagatttaacccaaggatagattctgcccttattttcacaccattcaacaaatccctttgattgtttttctttaaacaacatccagtcattcaacaaatcttgataatagttaagttgttcgttattgctttttcttgtttgttgacattctatcttgttgttcaactgccgggacttagtaagaagtgcttgatcttctttaatatcgcctagatataaatcttcggatatgtgatgaaatgaataccacaaggcgttcaaatgaatatcgattaacgttaataaagataattgttcattactgccacctagtctaagtgcattattcaagtaatcaacacggttttcagtatttaaaaacacaccataccacctgtatggtcttggatcttcgggattactcttcatccattcttcaagcagaggctttaaaagattcacttccaaagggtgaacaagtatatggtgaatatcatctgatgtttctaataaagcaaatagccaacaagcaaaattctgttgtgcatgattatcccacgtcttggcttcatcgataaaggaagataatgttttaagggattctttacgtaatcctttttctttgagaaagcaaaacttttcaaatgatgggtattcatctaatctgtcattttttaagatattagttaagatatttatcattgttcacatctctctttgttagagtaaagacgtgtttaaacttaaaccatttgaaacacggcatacaattcaacttcagctacaagcaaataaatcatatatctagcataatttaatacatcttcatcagtatttttctcttttttaaaagtccatgcaaataaacctaatacagttgccaccaatgcgatttcaattattgttaatattgacttaccttcctcctaaaaaaggcgagagttccttatgatgcatatttacttagtttcttcaaaagaataatgacaataaactgagttgctttcttcatatctaatatatgtatcttgggttaagaactttgtatagccggctgttttgagtatcgctttactcatcatgagcatatcctcctggatatcataatctgtttgaatatccaaattaactttaaatgctgcatgtaactcaaagaacgaatcgtcaaatttaaatttcaaaattttcattgcgatcccccgatctgtttcattgaaatgcgtcaatttagactaaaactataaatcaacctcaatcgccttttcatatgccgaatggaaaattattttgttatctttccattcggcattacctgctcctaacacatcaaggtcgtcttcaccctcggtatttcgggtcataatatatacggtgtccttattcacttttctcattaaaccagggtataaactaggaacatgcacataaaaatcgtaaaagtgattcgtttcccctaaggtggcgtttctatgttctattgttactgttacatttttagctggcgaagaaatggtaccgtatgaatcaccagttgcagccaacaatgcaactataagcactactggaattgttatacaaattacatataatttcagtattttataccttcgagctaacacaaaaaacccgactaaagtaagcagtacagggaaaatataatttgtttccaccacaaagcttaagtaataaccatcatgagacattaagaaaacagttaaatcaaatgctaaaaccaggataaagaaaattgttactccatttattttgcgtaatactttgtttaccatattcattccccccgttaatacaccacgctcgatcatttgtgatctgcagccttagagttgtattatagcaaagtaataggggcatcagtaataaagaacagaaagacctatgacaatttttagatcgtacagcgatctttttcttcattcttccatggtaatatcttgttgaagtatttcgtatgaaaggacatgatcatgaaagttttcgaagcaaacagcctgctggctgctgccaaacagcgcgcgggtgaatataaaaaactgcgcggtcagatggtcaacctgaaaaaagcgtgacaaggcatggctgatcttggtgacaatgatttctcaggccggggagccgacaacaaaaagcatgatgggcctgaagattataccagatacagaaaagaaacctgacaaaaatggagtgtatatggcgaaagttgaagccgggtctgtaaaaaagatagcggattcaagtttctttccaagagaatggaaccgcgctgatgtattaaaagcaattgacgaagcttatcatactagaaaacaagtacgttcaaataagtataggggaatcacttcaacaggaattaaaattgaaatgtatttaaatagtgacggaacaatagcaacagcatatccgttatataaaaaataatcttaaaggtgaccgtgacacatgaaatattcatacaggtttgataaagatccatttggtgatataaaaatagttttaccagaagaaatcagtcttttctctgacttcattgaaaatattacaacaatagaacaaactgatgagtatatagaatacattcagaatgttttaaatgggatacatgaggattttgaaattgatttaaatgggataagtgtattgataaaaaaagatgttaccgatattgaaaacccttttttaatcgatgacccttataaaaactcaatagaaacagaccaatttaaagagttgttattaatatggagaaataaaattcctgagatatttaaagattaagtacattcattattctacgagccggtattcaaatttcccagagaaccaaaatattaaagcctttctcataagagaggggcttatatagtgcgtgaaatttgagtaacatgtcagacagcacttgccgaaaaggtcggaaagtatagttctgttctgagtgatccaaaaaacattagtaaaataaaaaaatggctctccaatcctgatagtagacctcctaatgccttaaacaagttacagaacaaataaaacaacacattgaatgcctcaagataaaagaaagcccttctcttatgagaaggactttatctatgttttcaataggatagactgtcttcagtccgtagaaaagcacatcgagattgctcgtagtattccgtaaagtacgttcctttttgacgagttttcctgttctatttgcggacatattaccgcctccgttcggttaagtcaccgaaataaaaccgctaccttgtcgttggtaggaccgctaccctgcgccttaatacgcctaagtcatcgactaagtcaacgtaataaaaaacggctagaaacgttgatataacgcctctaaccgctgtggatgattccgactgggctcgaaccagcgacctctaccctgtcaaggtagcgattatgttctgatgcgaacagatgttgtatttcaaaaccttattttatagggtttgctgacaagtctttctgataaaaaatcttctgttttggctaaaaataaacaagttggtccccaattcgtccccaactgtctccacataaaaataaattaaaaaggacctgaatccattgagttaaatgtacccttatataccaagtgttcatctagataaaaggcgatagaataatgattgtaaggtttcgaatatgtaatagattgacctacgtcaggacattgatacatcttatcacaccatgtttcatatattccgtttgatgtaagatccttcataattaatttagcattgaatgttggttcatctttgttaacattaaatgtgaaagttactttttctttagtaagattcactgattctacgaaagtccacgcagaataaaaaaaccagtttttaggatcaactattattatatctctaaaattccgtttagtagactcatctaaaagattaataaaggtttctttctcagcttggcttctacatacaattctcttcaaaaacctaagatcacatttattaggtattatcaactctgcatgtctatgatatttaatataagattcattaataggatcgtagtaaccttcatgatatacaaactcaaatggcatttttctgaaagattctgcgtcgttataaatagtagtcgaatcagaggccaaattaccgtatgtaaaaccagaattatccatagcgagcattgatagactatcaaaaagaaaaaagactggcactggacaatgcgcttttaggtcgggatttatttggctgtgtgagcgtatcccttcattacgatactgagttggtgttttaggcctgaaataaaatctaacgtaatttttacggtctttccatgtattttctattactgtcttacttgcattatcgactttcattatgcctttttctaatgcttgattgcgacaataaatatatccttctgtaaggatgttttttgcgttcaataaatctgtgaaatgataaacgtatttcggaaaacgtgtcattttgagaggtggtaaaccagtttttaatttacctgtagttaactcatctattacttgtttaaattcatatttattttttgtcccttggttcaactgtggtttccccctctttattttgaaaaccagtgttcattttgtaaggtactactcttattccatttacaaaatcgtcatcgtcattaaacttatacgcaatttcgactggctctatataatccaatctatttaataaatttaaaactaaaccaccatattcatgcaaaccttcaggtaaatctttttttgtgcaaaaaccaacttttctaagtaatctccatagttctttaagttggtataaagaaagaacatgtctattatcattattttcaaaaagaatacatggtgatttttctaactgatcgaattcatcaattacattaatttcttcaagataaactcgccagttctcacctttaactgttagattggattcaaaattgatactgtattgtaagtcttcccagacttcattgaagcttaaaaattttggcattgccttcaaccaattttttgtagccaatatttctttatgctcaggttttgactttttactgtcagtaagatgaatatatacctctatcggcaaaggtcttaaataatgctccataagtggttgaacttgtgtttcccaatcaagacctccattgccgcatcctaataatggaaacgaaattgatgttatacccttttcttcataagtagcaacaaactttttcaatccagcttctatatattcaagtttcgatggcgaacgccaatgtttttttgttggaaaatttaatatccatttatgatcagatttgtatatccaaagtttacctatgtctagggctttattttcgcaaaaaatttgatattgttcaaacatttcggggtaaatttgtttaaattgtttagctatccctttccccatcaccccaacagtatttaccgtattaaccaaaacttgggctgggctttcaaaaatattctgctttacgtaagtaatcaatttacaacacacctttagtggaaactatatatagactattcattacaattattattagaccttaaacatataacttttatttaacctcaaacgggcgaaatttcttgttagcttcaagctctttttttaaattttcaacatcttgtcgtaaaaataaacttgacgtacctacttttttgaccatcgcgattcttccgtctttaattagtttactcattcgctgcttatttacatctaaaatctttgccacttcaggagtacttaagatttcacttactacaaaatcctcaacgtcctgacgacactttaaatggtactccatattttccccatcccatttattaattctcaatacagttcattcgataaggtcaatatatgacacgttcatcttttgagctacaataactgttaatctggaagaaaaaatgtttgtttctctttaaaatttcaagtcatcgaattcatttttcttaacattagtcttatgatataatttcattatagttgatgtatagaccaaggtctatacattttcaaaaataaactctactcttaagtgcactcctaataaaaatgttcaataacgatttttttcattacgatcttaaataaaatcctacctcctatttaataattcactacaaaacaaaaataggcaaaatgacacaaatcaaattactcatttttgtctttgaatcactcagtaatatttttctttattcttccatggtaatatcttgttgaagtatttcgtatgaaaggatatggtcatgaaagttttcgaagcaaataccctccttgccgccgccaagcagcgcgcaggtgaatacaaagaactgcgcggccagatggtcaatctaaaaaaagcgtttcaaggtatggctgacctcggtgacagcgacttttcaggccggggcgctgacaatatcaaagccttttttcaggatcacgccggcgtcacagacagctggcttgatctgatcgatatgaaaatcgcatttctcacaagccttcccggtaaggtcgaagatgccggactttccaattcgcatgtggaggaatcatttctggagcatgagctcacccacgccctcagtaaatcaaaggcgattatggaagagcagaaaaaagacatgcgctccatcctcggtgagatcgaagacatcatctcgctcgaattgttttcaaccgaaaacacggatcagaagctctcttcagcagacaaaaaaagaagcgaaacaatacataagctcggcaagctcgatcacgatctaatgaatgaatacgcagaaaccgaagcgaacgaacagttcattcaagctgacttccagcaacttcaaaatgccacgggcaaaggaaaaagcgccacgccgcttcactacaacgccaaagcgtaccgtgaaagcgacatccataagaaaaaaggcgatatcgcaagacattcggatgcttatttgacgattaaaaaggaagaagcgaaagagcgtgaaatcaaggatctgaagaaaaagctggctgatggcgtaaccgacccggatgaatacttagaaatcgccaaaaaggttggctatgagaatctcacccctgaacagcttgaatttgtttcatttctggaacagcgtaaagctttcatggataacggaaaagaagcattgcaaatcataggtgatggcgccaaaggtctgcttgttggtgtatacgatcttgccaaggataccggtgaaggagcacttcaactcggacggaatatcggttggacaattgacaacttaaacaaagatcctcaaaaagttctggatactgttctggaatacgactatctaggtgtctttcaaagtatggttgacacattgaaggatgattgggataaaaagatgattcacggcgatgcatatacacggatgcactatgttacttacttgggcggaagtcttctgttattgaaaggcggaaagtcctctgtctcaacaggttcgaaagatcttgctaaagttgggaaggcggctaacgaaaagattaaaaatggcaatccatctgtcaagccttatgccagtagatatacccctgcattagaagggattttacaagacgccgggaatactattaatgttaaaaatacgccgcttttaaagagattagttcaatcaaaggatgatttgattactaaagccgcaccttatacttacagagatgaatacggaaacctcaaaacagttaacttaaaaatgggccatcttaaaaaccaaaaacatcctaaaactggagttccatataataaagacggtttcccaattttcaaagcaaaatttgatacgaagattgattctaaactttataaggaaagcgattatttacaatttaaagatgcaaccttaaaattaaaagaagaaattgaaagagatcctttacttagaaatcaattcaatgaccttcaaatcgaaatgataaaagctggtgaaacaccagacggatatacttggcatcatcaccaagattcagggagaatgcaattagttgaccaaaaggtgcatcggcaaacaggccatacaggaggtcggcacctttggggtggtggaagtaagaacagataggagttggtcaatatgacagagtggagatttgccgaagaacccatcggggaaacaactgttaaaaaaatcgaaaaggctttagatattaagtttccaaacgactacatttcaactatattaaacaacaatggagcacgcccaagtaaaaagatttttgactatgaaaatacaaaaggcgcggtttttaatcgattacatggtctaactgaggatagttccagttttattttagaggttttagaagattatcaggatggaagaatgctttcagggatagtccctttcgcctgtgatcctttcggtaatgaaatctgtttcgattaccgtcagaataaagaaaatccctccgtggttttctgggatcatgaaattgcttatgaagaccctgatggagctttgagtcatatatctgattcatttaccgatttggttaataaactatacgatgaataaaaagataagtcccttctcataacgagaagggattctcttattttagtagagcttcaagcttcgcttttgttttcggcccgtaaatgccgtcagcagccagaccatacatggactggaaccgtttgaccgcatttgctgttttcgccccatatgcgccgtcgattccgaaattctttgcattcttatccgggtaataatgaagagccgccagcgctgtctgaatccgttttacggcctcccctcgggtcaatgggcttgtgactttaaaagtacccgcaggcaagctgaattttgacttttgagtggatttaggctttgacgatgttgctttcttcttgccgccgcttttcagctcgttatcgcttttgatataggagacattcacatatccgtggaatgtctggccttttgaattggtgtattcaacatatccccatccgttgacagttgatccaagctgatattttacaaccgtgccattcggcaggttaagcaccatggaagaagaggcgctccgttgtgtacgtagaacaaggccatcgcttgaaaccaccgtgtttttgatgaatcttcctgtgtctgtatgggtaacatccggatttgattcaggcgccgttacaaccacaccatccattcgcttttcgacacgggtcttaaaattggcaaaccctttagagttgcttacccacggcgccgggcaaattttatgtgtaatgtcgtaatgtcgaacaatgtcattgatcggattgagtttatacattttgcatagctcggcacaaacttgttctgcgcgggcaatggtatcaggatggaaagttccgtccttttcaatgcaaagctccacgcctatagataagaaattcgcattcggtttcagcgccgcgacaccccggtaagggtgcccgttgacgaattgctgaacgtcattcgcatgataggccacctcattcaacggaatgatgcaaatagcctctgtacgatcgacaaagatatgtgcagatgcaaacgtctgttttttctcagatagatttctgttctgtgcggggagcgtttgaccaaagtatctataatgattggcagcaggcgcgccggggtttgccgtgtaatgcaccacaagtttcttcacgccgttgtttttgattcccggccgcgtccatttactaatatcaatatattggtttctgtatgctgacataaaatctctcctattctgtttttggattcaaaaaaagcagccggattaaccagctgcctgatcgtctttttcttttgtctgatcgttgtcgctttcaattacatgaagcctgtcagtgatgacggctggtatcttaaccccgatctgcgccaagttttccgtgatggacaggccctcatttgcgatataaaaaagaacggttccaaaggtcagaacaccgttcaaatttgttatcgtatcaataatgtttgcgacgatgaccaccataaaactgagcatcttccgcacatacccaaaccacgcgctgcggctccggagctgcttcattttccacgctttgataatgccggtgatgacatccaagatgctgaggattagaagcaagtcaaggtacttcacctccccgaaaagatatgttcttgcgatctgtaagctttcaaaattcatccacacatgtattccctccattttgatcacctccttcgaggcaaaataaaaacacctattcagttacaggtgctggttcactattattttctttcgccgctactgtcgcatttaattgcttttcgagttcctctcgtttattatctgcaaacgtgtataacgctttatattcggccagctcactattcttcagattcaattcctgctgtagggaagcagctttatatgctgcaatttgtaactggtcctgaagttgctcttttgtcatttcttgcatgcatttcactccttactcttgatcgggatacgcattaccgcgttcgctttctgtaatttcatcatattccgcttgtgtgatgcggcctttctcaacggcttttctcatttcaatggtcaaaacagttccgtttttccagcaatcctcaaaaaacccgaaaagagcacttcggttctccaatgggctccccccgtttccttttattgattcattaagagattgcaaacccgctgaaggtcatggacttgctcctgcaacttttcctctgtagtcttttccttttctctatcttttgcttcaatatttaataccacgggctcaagcttcatctttgccatcctccttattttgaacgtagattgttataagcccctctcggttgccttgtggatcaacgacaatttgaactggaatcataataagctttttgctcccactgtacccttggtaataaccatcaggctctacataggtttttgtgagcaaatagctgatttcatcagactttatatcatgaaggacatataattgatacgctactttggttgtatcgtccggctgcagatcgaacgaaacagcctccatgggatatgtcttgtctcctttttttatagagccggcagttatttcgattcccccgctggtttcttctatttcgatgccgtccgcataataaagactcatgttaaaatcccttttttcaatcataaaaattactcccttattgtgattcgtaaaaaataacaatttgaacttttatcgtttttcccgcaactccggcagtagtcccggtccctctcactccaatatcaacagaactggcgcttatattttctaatcctaccgtaaccgcattagaatatgcgccaatcgctgtacctaccgctgcaaaaacgttctcaggcgcataataaaaactatcaacaaaaggaatgcgattgtagcgcgcgtacgcagttgcccctccgtcaggcggcagtttaatgtcccaagtaaagcagtaaaccatcaaaccgtattgcaggcctccatgctcgtcttctaattctgtagaaacattgccacccatcaatttgaattcgcaattttttgcattccctgctacaactttggttcccaatggtagcgttaaatctgatgcatcaacaatcgttttttggcctgatttcagtcgaatgaccccggggacatcaatatctaaattattcggtttaaagcgataaatagtagctgatccttcaaaaagagcctgataacggttatatgtgaacggctctcctatatttttaggattggtactagcagtaagaagaaaggcgtcttcttcaacagctgcctgtctttccattttcatattaaaatggcttataacttgtccaacgtctcctatttctgaataaattgaaatagttggaaccgtttcatatgcggtttgctcgcctgcaccacggagctcaattttgccatcaccaattgagactgttctgtagatttcattagaggaatcaccaggatcgtaaaaccttccttgttcctgcgttattttcgcagaactaacaaccaatttgttgtaatcataatgagagtctctggtgaattggtaaatcttatcaccttcgatatagtattcggcatcttctgattgtgtcagcgcctcgaaacgggccccttttatgtccacaccctctatcgtgataccttttaacgtcccgacgtttattttgtccgctgaaaggtctttgatcttggcgtttgttattgaaccgtcaatgatgtgtaccgaatcaattattgcttcttttagatgcgcctttgcgatagccgcattttgaatagccgctgtcccgattgccgcttcagctactttcgcacttgttatggctgcattttttatatgagctgtttctattaccgccttttggatgtggtcgccatcaataaccccatcaaccagctgagtatcaaacgggctataaccataatcagaaatgacatcgcctttgcgtacctgtaccttacgaataacaaagctacagggctcagtgtttccgtttcgattatatccgccgattccaattgtgtaatcagagccggtttccggagcagtaaatttgatattaacccttataaattgatcagacggaaaagcagaaatatctttctgttcattgctgctaatttgtatgaaagtactgccttttttcaaatgaatataatttatgtctgtggtattattcctctttatttcaaaagacagtgtatattgttgatctttgaccaatgccattctttgaacattaacaggcgaggacctgttaccacatattccgaaagctattctagttgttccattgatgacttgagaaacagtcatttcgttaaattctttttcctcaacactgtggcttgtgtccgggtaatcatagaaccatttagattttaaaagagagccaggtaagatattagcatcatcaaagtttcttgaaagtttatcagcgtcaacggccagctgggccagtttttcttttgtgatcgctccgaaaacaatatcatcagtcagaatgcgctgggtggtcgcggaaaactgatctgtgaattcgcttgctgtgcctcgtgtgttgattgagcgcaaacgataataccaaacttcatttactcccgtaaaatgctcatatccgcttgttttgcctctgaaaatacgattctcttttaatggggtgaatccattcatttgtgaagcatatacctcataggcagcaataaaactggacggatcatagtcccatgtcaaagccacattctgaaacataggcttgatcgttacattcgacggaacaggcggggctttgtcggggaagctgccgtccgtaacctctccggcgtccggtttgctttcccaagtgccacggttcttttcgatcacactttcaatctgctcaagcctaccgtctttttgtaatgccgataaaaattgcccgatctcaacgacgcatgtattatcaggatcagtaatatcgtattccattgaaataacgcgctgcgatgtctcaattgggatagcaaaatttcgatcaattgcgatcgttgtatctcccaattccacatgttcgtgttcgtgtcccggcacgctctcgagcagttgcacggacagctcataattgatttctgtcttgcatgcagtcgtaatcaaatgattatatgtggcctttaagagctcttccggctccgttatgtcttcattattgaactggccttcccgatggattaactttccatctttaaggcgccccaatcgttctaataaatccggatcgccaacccattcctggcctaaaggcttatcgaccgggtcgccttttgattttttccattctacttcagagaaatcaataaaacgagaatagccgcccgtttcctctccttcctcatccgtagatgctatggatgccccgtaaccccaaagggctgtcaccgggtaactgataacagtccgccggatattcgttgtatccttatcactctcaaagcgcttcccgctgtctttaccgcgacggggaagtatttttatgattcgtttgacgactttgttcccgtcaaattctatagtatcctgaagctccccgccccatatattgatcacgtcagcgatacaatccagagctgtttttttatagaaggtagtcgtattcactccaagttccgcagttacttccgccacccatcttgaccgagaaagaacgttgtccagtacaaactgagcagttttatcggtaggacggaaatcttttacaaaggtttccgcaagctccatcatggcagcctcacaggtaacctgtgtgttaacctctccttcttcgtctgcatcatccagttccttgatgacaaacagacgcattacaccgtccttatccttgaataccacttgattctcttcgaataggaagcgtgcgtcagggtgggaggcatccgctacaaaagaaaaagaagagcccttattgagctcttccttgtatttcgcatcccagaacgtacaggtttctcgtccgtggctggacagcactgtcaataatttatcatctggtgaaagtatataaatgtcagccatgaccggacctccttacaaatatgcctcattaaatttgatgttgctcttatgactgaacttgattttgactggcgtcctgggcggcagcagaaaccaatctgattgaatttgaagtgctgtcatgattaaattaccgctgcaagtgacctttctttttgctgaatcaattacaagagtgtcaccagcgatgaaatcgtacagcagtttgatcgttttcgatacagacccatcagcattaagaagagccacctcatatgaagtggctttctcttcaaaaacgcatacaattgtcgggtctacagctgcatagcccggattagtgatagtttgaacacctgaattaaattcaaaatccttcgccgggccgtatttttttggatcgggacagataaaagtcaatgttgcagtctgaaagcctccctgttcttcgccttctgaaatgctttcaaagacagcattatagactcggtcgggctcatcgtgaaaaattaacggtttaggctcttcaatgtgcagaataaaagtcagttcctcttgctttttcttcaactcttcttcactgctgaaggcgaaaagaacctcaatggttatgactctcacgggaattcttgtgttacgcacgaaacctcccggacgattcccgatagtggctgtattcacttccctccctgtcacgcctcggccgcccgtggactttacataaaagaagggtgatatatcaatgccgtcaaacgtgattttccattggttaggcagcagttcctgataattgatcaattaaatctcgtcctccttgcgttcgaccttttctgagcgtctgtgacaggtttttctacgccttgaccgaccttcttgctgtccatctcaacaacaatcatcctgtcaggcaattcaaggttccggatgtccgcgctcaattcttttctaaccgtgccgagttcaccgctagaaatggatgtgtcatatgcaaaattcatatcctcttgttgaatagtcatagcatcactgacgactcccatagctttctgaacagtgccgataccattctgaatccccacagcgataccggcaggaaccatgatcccgacctgatcccgcatcaatctggatggggagtggattttcaattttttcttaatggttttctcaattgtcgatgcgatggagtttgcttctttcgccaactcgcccttcatgttcttcattccagaaataatgccggccattgtatttgacccgatggctttaccgcttttcttcagtgaacccagctgttttacgtcaactgtaagctccccaattttgcggagatagtcatttttcagaagtgccagttctttatttgcggccgatcgtaattcatttattttcttggtcgtcgcgttcttcaacccggttaattcttgggcagcctggtcactggccagcttgtgcttttctttccacagactgacatactcatttagctccgaatctgtcatgcgggctattgcattgatctgatcagctgatccgacacccatttctctcaattcatccgtaaatgctttcggtgcccggcttgctatttttgaaatgtcattgttgaacgttttgatcttgtccagctgctttttaagatttgcagtcagcttggagccgttcactttttcacttgagacatcgtcaaatagaccgatggcgttataaatcgcgttagttcggtctttcagctcctttttataggcatcgttggccgccttgatatcagcagtcagtttatcattcacacttttgaattttgagagataagtattgtttgcagaaagaatgcccttgttaagtttgtcagccgctttcttttcggcttctttctgctttctggccttatcagccatcattttttgagtctgatatatttcccgttgaacctttatttgctggtcagaattcagcttgttcttcttcttgattttctcaagcgttttgatataggtattcccgctgatttttcctgtatcgtattttgcctcagctttcttaatctgatctgatactttcttggtatacgccagtttcgccttcgcttccttgcgctgctgctctttcagtagcttcttctgtttatcagaggcgcttttggatgcctgatatatctcgcgctggatttttcggttttgctcactggtcagcttgttttgcttctgaatcttctgcaatgttttgatatacgtatcggcacccattttcttggtgtcatacttcacttcagcgttcttaattttgttggatacctttacctcagccgctttctgagccgcttttgctgcttttgccgcggccgcttttactttggcctgcgacttatcaataccagccgccataccggtgccgacgtgataaccgacctggtcacgcattacccttgacggagaatggattcccagaagttttttcatgccgttaggaattgcgtttgccattgatttcactttgctcgctaaagcccctgccatgccgctgataccatttattaagccttggatgatgttgcggccaatggacttgaggttgatgcctctaaaaaacttcatgacaccattccaaatgctgacgatacgttcttttgttgcttggatacggtttacgatttgcgctttcatatagctgaatgctgtgacagctgcactttttaaagcattccagacagatgtcactttgctttttatcgcgttccacaaactgaccattttgtctctggttgcaataatccgattcacaatttgtgcgcgcatataggtaaaagcagtcactgcagcacttttcagggcattccatatggacgatactttactcttaattgcattccagatgctgatcattttatctctcgtcgcaatgatcctgttaacgatctgggcccgcatatacgtaaaggctgtgacagccgccgatttaagacctgaccaaattgaggtaatagtgttcttaatgccgttccatactgaagtcgcagtcttcttaataccattccagacattagagaagaacgactttagcccgttccatgttgatgttgctatcgtctttatacctgtccagacagtagacaaccaactggaaatagcaccccataccgcaattgtagccgatttcaccgtgtcccaattcgcgatgatcaaggcaaccagaccgacgacagccgccgtaatccatccgataggccctattgcgattacccatgatgccgccatacgtgccgcctgtgctgccgcttgtgccgcaagcaccacaagttgccgaccgaataaaaccatttgcttaccgcctgcaaccaacaaagatataaaattgctgatctgcgccgccgtccaagccgctgccatgcgggttgcctgcgctatggattgcgctgcaagcacggtcattttggcaatgaaaagacccatctgcttaatcccgtttgtcagcattgtgataaaagaggtgatcttcattgctgtccatgcggttgctgtacgggcagcacttgcgattgattgagcagccataacagtcatattcttgatccataagcccatttgtacaatgccgcgcttcagagcagaaatcaacgacgatattttcatagccgtccaagcagcagctgtcctagccgcttcagctattgttttcgccgctaaaactgtgtactctgctatgaatttaccaacccaaactatgccggatttcaattgcgatatcattttagcgagtgtgaatccttctgttcctgtgacgaatttttttacccatttagctgcagttaaaaaatcctttaagccgtttgtaacagcgctgacggctactatcgccggaacaatagctcttaacgcaccgattaatgaaatgcccgccgcaatgaacttcccgattgccgggtttgcttccatcgctgcattagtaaatttcaaaaacccgtttacattctccaaaatcgttttaccgagtggagccatgccaacaagcaagttgatgatagtttttgcgatctgccccaatgtgctccatactgtaggaccgttggttttgatatagtcaatgaacgattgaaattcttttgttttcgtaacgctgccagcccactcattgaaccgcttggtcagatctacgagtgatgtcatcatgtcttgtgacataggagcgaatccagtaaacagctttgtcaggccgcccgaaaagtttctgataatctgcaacaattttgggccgttggtttttgtatactccacgaaagcctgaaatttctttgaagaacccaagtttgctgaccatttcacccatgattgggtcattccttcgatggattttgtcatgctctttccggtcggtccgaatgctacgatcagattgaaaactgtccgtaagacattcccggcagatcggccgaatgaagcaaacgccgccggagcttctttgttcagataagaaatgaatctctgcatgtccggagctttaaaagctttgtccatgcttttcgccagtcccacgccctcttttgccagtccatcaaacattggaatgagtgagttaagcgcgagtttaaacgtatttagagacataccgaatgtttttaagatcggcttttgaaccatcgtaccgatgtcccgccaattgtctttgaagtcttcgaggttctttaatgcctctctctcttcttttccaagagatttttgcagattattgatctgtttcatgattttagcgcgctcttttgcgcttgttgcattgtccagcttctcctgcagctttgaaaggtcttcggatgctttaaatacaccgcttattgaagtaacagcaagggcgccgaatgccgccgcgcctgttcccgctgttgcaaatgcactggttaaccccattactccgccggctgccaccccgagcatagggcccaatgacccgattactccggttatgctggcaagaaccggagaaattgcaggcaatgcggatgtgaaggcgccggcaagcgaatgacctatgacagttgaaacagagttagtgattttggcgagcctgttcattgatgtttcaaaccgatcaattcgggcttcgatgtgtatccaaacacgttttggcaaggaatgtgtctctgttctggctactgctaccgctctcgttaaattcgaagtatcaccgtttatgttggttgtgactctatttcgcaacgaagctaaagctgtccgtgcttctgacacagctctagtcagaggatctgaatcagcatctaaatcaactcgtgtgcgttcatgccgatgtacaaaattatcaatttgctgctcggcctgccgcactctggcctgaaagcttgcgatctctgcatcgatttccaccgtctgatgatcagccatccggcgcattatatcgttgacacgatccatactgcgattaaattttcgtgtctgtgcttcaactatcgctgtaagtctttcgatcattccctcacctcattccttgaccaaatttgcaaagtggttgcggattgtatcattaaaccgctgaacccctttagctcgcttgccgagctcgtttacatctgtcttacgccatttgtcgttatcgccagtgatattgcgctccaattgacgtctggccttattcgcatcaaacattttcttttctttggggcgcttctcattcatagcgtaacggtgaaacatggcgtttcttgccataagctccaattcatctatttctcgcaacttggccccttttagtaaaagtttgtactcgttaggagtccacgacatgattaaatccacatcataaactccgagccaatgtgcggaattcgtaattatttggtcgtagtcgatcccgttctctctttgtacgcctctttcatcatcttcaagacttccttgccgttctcttcgtcctccagccgtttcgcttccatttccggtgtttcgttcggagccggtttcttccctttgttcatcttctccatcatcttccagcgctgacggatcacgcctttgaaaaaacccgctgagtccagtgttgtgaacgcttcattgatcatcttgtcaattgcctcgcctgtctcgtcttcatcaatgattttcatgattgcttcttctatagcctcagtagatggcttttctttcttcaagtaagcgagtgcacaatcccaaaaagcagaaagataggaagcctcttcgttaagcaggctcatgtaaatattcattgtgccgccttttcccttttcgtcctcagtggagtatttttcgtttgccaatctgtcaaaagcaaagtcgcaacgtgatttgtattctttatctccgatagttaagtaagccatttataaaacctccgattatttttgtatgttaaaaaagagcccgggaagcccggaccctataattccttttctgttcgtatcgtaaaattggccgatcgttccgattccccggccgagttcactgccgacacgttaaaaatgtaggcagtgtccggcttcagattaggattcgacgtgtacgaattctttgagacagtcgctatttttgcataaaatctgtaaatgttgtaagatgtcgcccctttcaccgcatcccatgaaaaactcacctgatttgaagtggcgcttttcgcacttatattgcggggtacgttagggcgtaaccgcttgtgtttgcgtaacaatctcagacattgaggactcgcctgcatcgttcacagcagagacgttgaccgttaatttcgtgtcggccgcaattcctgtcaaggtgtgggatgtgcctgtgacagttgcgtccagctgcttgtttgctcccctgtataccttatatgaagttgccccatctaccgcatcccatttcacagtcacgctgtcagtcgtagccgtgaacgatagattttggggcgcattagggtgtaattgattttttggcattctcgccaaactgcatgaactctttggcacccgcagaagatctgatttcgtcaattaattcttgaggcagaggatcaagttcacctttacgggtcttgccgagaacaggcaaggttgttgaaacctcaataaacccatcttgcggggcacttttctctaagttctcgatgattgcatgtccatattcagaatcatgcttgttgtttttgtttttattcaggtttactttccatacctgaaccgtctcttcgttatcataagcatcttcaatcgccatttgacctggatcagagacagcagcataatatgtcagttcaatgctctcggatttagggccgtaaccaacaattcgaccagactttgttgattcatcttttgtatcttgttctttcgtatgactgccttctgtttggaaagcgataaacagaccttcagttgaagtagccttcatcggttgaacaaagtaaacctcatcaataccattcaataaatccattttgttcatcctctcaattgtttattgtgaagcgcattctgagaatgccgtgacgcgtgtacccgtcaatatcggtgatcacctgcatgctgcgcatctcagaacggcataaagaaaagccctctattgttaggggcctgcttgttaacgcttgaagcatgaggctcagaatctccattgcttctttttttccgttgtaacctgaccagcagtgtaaaaccacattgatttcttcaccgctggatgtcttggttttaaatggggatacatcatcatcgcccattgtcacataaggcttttgctgatctttcgggactgcatcaaagacgcccgtgacgcgcccgttcagctcttcgtctgttgataacctcttaaatagagcagcctgcaacggccacagggcagatcgcatgatgacagctcctttctatcacatttgactggcaaaataccgcatgccttcgtccaccgctggattccagaacggctgcgcccgcattccccgcgtgaccacccatctattaagcttggtgtcataataaacccacggcgtttgccggccgccgccttcctctgcgtaaatccctgttccgtattccacatatacggcataatcggcaccaacagaaataacggcccgtaagccgccctcttggtagtcgatttcaattgaatttttcaggttccccccgtctatcgcggcggttggagcattcagaacagcatggctgtaaatcagctcggccgtgtctgtgaccagttgcttaatatcatctatgacccggcttctgaattcgctcgtggctctttgcatctgcctgacccatctgccgctcacctcagccattgcccttcagcacccccgtaacctgacatttcaaattcataatctcatgcatgccgccctggtcgatcggatctgatttgagtgtcagcaccttgttttcgtagatgatccgcattgtcttctcaatatcattgcgatacgggaaatacacattgcaatcaaccggattctgaagctgttgagcctgataatattcccgggacgtaatcccaccgacaaaggcctctgttgtgagataatcagtgaatttttcaacatagcccccgccaccgtccggcacctcttcccaccgctgaaacgttatgacatgcgggaattcttcatagatcatcggaatgcctttctgtatgggtacagattcttcataatgtgttgcgggaattccgtgttatacgaatatgacacatcccccatacttctcccagacagaccagacggcgtcatattgtattcagccgctttcgcaacaaatatttttacaccagcgggcagcgcttttggatcaaaagtatttttgcattcgtctgcggcaacctcaattaaaatagggacaacctcagacaaataagcgtcatgcttatctgtggttatccctatcattcgttttacttgttggatgtccattggatcaccctttcaatttttcgagaagtgtttctcgtttcatgttgtaataacctgagatccctttatcctttgctacctgcttgagttgctcgacagtcatttcgtcataagacagtttttcttgagctgccttatcgatgtttgcacgccttttcaattcttgttccaagagccaaaaggttgttgctcccatttattcgctgcctccctctgcatcggttttagttgcgatttccgacattgcagattcgccgctctcattaacagaagtgacattgattgttaattttgtatcaggagttaatccgtccgtgctgtattcaggttttgttacattcttatcaagacgtttgtctgctccccgataaacattgtatgatttcgccccagctacggcatcccaattaacagttacagagttggttgtacttgtaaaccgtaggttttggggcgcattagggtgtaggtgttactactggaagtgagtcatcaacaataatggacttttgaagatatgttccaaaacctacatcagccctgttgtttggaatgaactcaatcaagttttgtttctgtaaatttgtatgcgttagtgaatgcatagcaattgaagtgaatttgcctttagcatcaccgagtaattgagctgcatcaagaatcacttcgccgcttaagctattttttggtgatgcatctggaccttcattggaaataatcttcacaattcttactttcttcttgtcataaacacgttcatagttcttagcactttccaattctgcgaacgtaggcatttctttagcgacatctgcttcggtccatttgaaaccacgaggatgcaaaataaatttcttgcgattgatcaaaatgtcctcaccttttagtgaattccgatctgtttccgttggtgttttcggcatacctggggcgtaaccaacagcaccgccagcaaataggtaagttgtgtattttttaccctcaccgctcgaaatatccaacactaaatcaccatcgttattagtaatgttgctaccaaagactccattaagcataaggaagatcattcgttgaaattgtctttcccaatagaaattgacacgatctccaattgctctcactggatctgatccagcaagctcaccagctaaatcttctgcgctccaagccttaccatattcaaatacacgagcaacgtcttttcctgatgtgattttttgtggagttaaagcaaagtctgattgaatcgcttctgcatctccttctaaatcgttccaaaacggcatattcactgtagcgccaccatttggaacaattaagcccggcacaggttgaataattccgctacgatacactgctgtttgttcaacagtattgttcattgtgtactgattaaaaacttctgggatgataacatcttgaactctagttactggcatttaaattctcctttataatccatagattgcaggatttccgcctgcttggataattaattttcttgcttgttctggatcacttttcaaaatgtgaccttgctcagtcaggtttaaatggtcctgactaaatggattcttgcctgttggtgaatgaacaactgattttgctgtgtcatgtggctgccttcctgctaaagacggagcgcttttttgatcttcctcaaaaagatagctgtcgctttccctgagagtcgttagctgttcatcaaggccaattactttgccgtcagctaatttcaaaccatcaagatttaaattggctttaacagctttgatattttttgacttcgcatcacgtaatgctgattcaatcgcgaaatcaaaagcctgctgatctaatttttgctgatactcctcagcagtttttttgttgttttcttgcaattgttcaattgtcgcctgaagctcttcgtttcctttagcctgtttctgcaaggcattcaattgctggtcccgttcgtcaagctggcttttcaagtccttcttctcattgttgactgcatcaaaacgctccttcgggaaccattggccgttactgacaatatcaatcttttgatctccggctttttcgatcacctgagcatataaatcgtcaccgagcaattcttttaaactcatttcattctctcctttgatgtttttttgcgtgtccacctcacgcacaggatttacgtttgtttttgctctaaacctttaaaacgagcagacaaaagagccttttaacgtcatgctcaggacaaaataaaaaagctgtcacataagtaaccagctttaaagcttacctattttattatcgaaaatgtttgttagcttagaagcaacaatgccccatccattaaattgactagagtgattgtctttcgctctgtactcttcctgtaattcaaccattttttcagcagtctttgtagcaaatgctttaggagtaaacagtgattgcttcaactcactgataatctcgttgtaactatcagagtcattatattgaattgcactattcaacatttctaagaggtatttaatacgttcgttctctttcatgaatcatttccccttttcctcaatggatttgtaccactcttcataggtttggtatgggatggtctcgccagctccattcccgcgcttacgggcccttcttgtatccggcagcacgccgtttactttgaaagtaatcgtgcaacggcagttaatatcatccttggcattattcatgtgccccggagccggcccgacgccgccgtaaattgatttgaagagcccattgcgctctattgtcttcccgtccagcttcctgtgcccggctcgtgttttaagatcaagggtagcattccacattttttcaagattgctccgttttgaggccttctcagcgctttccatcctcgccgacacttgtaccctatgagcttctgttctcgctacgtcacgggcttttctgcgcgcgaattccgtcgctctttcaatgcggcgggcgatctttgaataatcctcccccgcttgcaggccctgagcgacggaaatttgaatctgtcggacataatcgtctcgatgtcgcctgtatatcgctgacaaagtcaattcggctatagggtttagaatggcctgccgaatgacttcggctgtcgggatgctaaaacccaagtttaccacagattccaattcaaatagataagcagaacgcatgtaattctctaaaaactgcttggctgctaatgcctcaacaattgtcagaatggttttgaaagccttgtgagattcctcggccatcctctccatttccttgttcagacgattgtatttgttggcatcggcaaaagtaagctggccgtccttgctgtacttcgtatacagccgggcaatttgtgcattgatctcctttaagcgagacgcaaaaacgacatcaatcttctgagcatcctcagtgatcatgtcgtccaggtacttatcaatatcattctggttcatcttcatcaccgcccgcgtctgtctccacatccgttaacggcggcatgctgttcctgtattctatttcttcagattcaattcgcttcatttcagcttctacatcgtcaacccatggatgatgagcgagacgggtttctttgcttaaatcagtgctttgattacccatctgtacctcttcaagttcattggtcatacgtgagcgattgaatgtcatttgtaaaagcgtgtgatcgtattccccttggcccgtcattcgcaaatattcagtaaaaaaccaaaagaaggcatgcaaagccggacggaatttcctctcagcttcatttgccttcagatcaagtaaagaatataggtttttaattgcaacgttcgtcggtgaatttcccactttgtcaggattattgttaactccctgcccgaaccggtatatattttcctcaagtcgatcaaggtgagaattagaactatccatggggatttcagcagttttcatgttgaatccgccaccttcaccaacagcaacagctttatagtggcgcagatttgtgacaaattcagataggtcatccgagtaatttatcaattcataaataatttcttgcatttcatcaaaagtatttgcgttgtttgaaatgttgctgttgtattgatcaattaaatccttgtaaaaaacaagatcgctgacaccttcttcattgttcttgaactcgattaaggggacttttccccatccatacccggcattccctaaataaaaatgactctccgggtttcgttggtagtcaaaatcaagaacgagagtgccatcgtgcattacgtagtagaatatctgctcatccgtatacaattcgaccttacgagtgtattcatcatcaatgtttttcacatcataatacctgattgcatagagaagcttccgctttttcgtcgtatcgtataccgcaatgacttcttcagccggaatccggataaaatcaaatttcccgtcttcatcaacaaacgggtggagccattcactgcccttattactggcgtttttcaaaagctcattcattacgtcatcaaaatcttcgtttacaaagtcgttgaccagcttcaagaactttgaatcttcagcattaaaagtgattggtttcccgaccaggtattgcactttctgttggaccagcagcttgtgccagttatgagaaatacggttattgggtttttccgtatctattttgcgtacgccatcctcatagaaatagcgcagtcttttttttatgtcggcctgattcatgtaatatgcgacgccctcaagcattcggtcacgatctaattcgtgtttatcaatcattttttggattacagtagtgttcggcagagtatctgatgtttctgcactgtcctgaatgattttcaacagctcttctgtgtgtgttggcgttattggatacaatagaaatcagctcctttcttttcacctcttcatgacccgtacgcccggccgcttcatatcccgctcaaaggcataacgagtagcatctatagtgtggttgtcagcgtcctcaagcttcgccttcggattgccgtctctatcagtctgatagtcgatattctcgaattcccgggcgatattaggcgttctcaacggatcaatgataatggcgtccaaatcatcaagccattcctcgccatattgaaccgagtcaggtccttttttagcgcctgtaatgcgtcggatgccatgatctattttcaattcatcaatacttttaggttcagcactgtcagcagtaatttcttgactctcatatccttttgacctgatccattttgccagctctctgttggaaaccttttgatcataaagctcatcaatcgcatagatactgttccgcttcttgtcatagtgccacctgacgtaagcgagaggatcaggaccatatccaaagtcaacgccctgccggatgttgtcgaatgaacgaaccatttcatcagtaatgcagccgttctcgattttcaaattatcaaatggcacaacaccactccctaacgcttcgccgagatactcatggcggtatttgttttcattcttccgttttacctcctcagcttcacctatgaaatctttcgacaaatacgggttatctttataagtggaatgattcacatatgtgttcttcggcaggctgctcgaattaaaaatcttattaacccagctctgttttcttttcggcgggttgtacgaataaaagaaaatgtatcgggagcccttcggcaattcggcacgaagaactgacttttcaataatggaaatttcctcttcggttttaaattccgctagttcctctatccacatgccagcgacaggaaacttgctcaccttcaatgatttgattttggttacatcgtcaccgccgcggaaaatgatactattcccccgcgggatgtacgtcagcttcaatggtgatttactcactttccagaggtggccgacttcaagcatgtcgatagcttctttcagttgttcaaaaactgattcctctatcgttctgtatacacgccggatgaccaggaatgtaattggcatcatcatcatcaaaagaatgatccacatagcaatgtgcgtcgatttagctgaaccccggccgcctttaaagacgtatttcaatttgtcgccctttttgatttctcgccaagctgccaagaaatgaggcgtaaatatctccgagaactttatttgcttcattcttcatcacctgagtcatcaatgaactgcacagcgaattcgcctgtcatatcaactttctcagtccacataccgtgccgcttaccgagcagttcagctgctttcacccgatcctttagataggggtctttatcctctaattcctgagcgccttctccgatgccgacgggaatctgttcagtcttctcgccccgcatcactgccgttaagaattcaagaatctcgtcttgtgaagccaccctttccgcatccttttcagcaagccgctctttaatataggatttgatgtcaggtttcgtcaggttctcttgaccaattgatttagctgtcttttggctgtaacccgcttttctagccgcttcagtcgcattaccaagctcaatataaaagtcggcaaaacgcttctgtttctctgtcaatttcatagcatatcacctgcacctccttgaatattctctctaaaccgcgcccacactcagaggctgtcagccgccaattgttttatctgagattcactggacccggtttacagagaacataaaaaagcaccccgcaggatgcttcttttaactctttgataaataatcttttacataatcaatcatttcagtttgttgtcctctagcctcgtcattaagtgggacccaaggaataaaaatcggtttttcgccaaacacttccgctctaccataataaccgttttcatctctagcaatatagacgtcaaaatggatcgtattttccggtgttttaaaattatcgattttcacataaatatgactttcgatatgataaattttctgttccaatcttctcacctcccaccttattatcggttaaggagtatgataaaggaactattcgcaaaatttgtcgaacgaaagcgcccatcataaataggtggcaaccgtaagacgaaaaaacacccttttgacagggtgctcatttccgcctatgtttttggaaatccaaaatatcctctttcagaaaaagcctgtcccggggcatttctttcatcggctctaattccccggtctttactaactgattcagatactgacgggtgaaccctaatatctcaagcgcttcgcttgtattgagtatctcttcattcaagaatttcttaattgcatcacgctctttaggcttgtacatttttgaatcatccttttttctcacgatatttcaagtaaagggaaaatgctttttcaatgattgaaacaacaaacaaaatgattagacttatatcgagagccgtttttaacggtcccgctgccacatcctgacggaagaacaacatatacgccagggcaaggagaacaacaatatcggtagtagactgtacacttttcatttttttgaaagtggctggctttcaggtatttttctttaatcgccgcatttgctatacttggagcaagggagaagcgctaccttctccctcggctcaaaatcatctgcgctttcttggacgtctgcgttttttgattttgggcttttttgttttaagcttttccctgatgatgaggactttctcaacaactgtgagagttgtgaggataatccccagtaccaatgcgatttcagccactttctttccctcctttctatactttaattatacctcatttatttactcacgtcaagtaatatcgtgggcttttttcattatttctccaataaaaaagagcctattcacgctaaacagaataggctgtgatctgctctatttttcattttcaggcgggaacgttcaatgttcttctgcacggttccttttttaatccccaataactgcgctatctcttcgaatgacatgttttgtacagcatgcatcatgaaaatatctttttctctttcggtaagcacggatagggcatcagcgattctttccttatcccaatcacttacttccccctcagcttcttgaacgattgcgtattcttccggcagcgcatcaattaagcgtggatcagcaagaatcgtcctttgatatgcgtctcttctgtcagcacctcggcgggcgcccggctgtcttccgttctgcagccattcaagagtgaattcaatgtcactgatcatgctactgattacctttttgtcgttgatctgttcagccgtcagatggacttcagccgtatctttgtagagccgatacatttttcttgtttctcttaaagctcgtttgtattcaatgattaaatcctgcattctgattcctcccttatttacgcttaaatgccccgcccttgcctcgtttaagtatttgcatgttcgtgctcatcatttgttgccagaaacgatctgagcgctcctgcgtgttattattgggatttttctttttctgcttcatgtcattcctccgctcaaataaaaaacggacaccaatcagagcacagtgattctgtgcaatgatcagtgtccgcaggctttccgtcttggactatatcaagttttgtcttttataaacatttttttatcacatagttcgtctaattttattatttttgtttccgtgcataatttaggatttggtttatttcctaacaaaataagttccttgctgacagcatgtaaaatataccaataggagtcatcactttcttcatttgttgaaggattttgttgacgttcttgttcggatctatctataacaatatatttatcttttgaccattcgactaatctggaaacaggcctcattaaaaatggaactggtaaagaaaaaataaaaggaatacccagaatataaattagtttaattaactggttctcgcctttgatacttccgattatacaaccatcaagcgcaacatagaacaatattaaacaagttacaaaaacaataacaacgctaaaccttatccaatatggtttgaaaaaattcgtaaatccccagtccatgtcctcaaattctatgataaacaatatgactgcgaatattatttctccaatcgtagcagttattgtaccaacagtcgtagatgtattgaaattaactgtccattctggtaaattactcaaacttaatatagtaagaaaaaccactgtccaaaatactgtctgccaaaagtgccgccaaatcattatagtaaacaatttctctttagaaaaaagcttcttttcaaatatattggcagttaaagtagttattggcctaaatgttacaactaacccgtaaactaagatacctgcagcagctatataacctggtatcccaatactcttaaacaaaccaacaacatccataacatttcctcctcttctaatagtctctttttagaatcggcaaattatggatttcatttagttcttttagggaaatcactatttatatcggatttatttatcttcccgttcctctatatacttatcaatatcttgaaaaaacgccgcggccgtgaatgcactgattgcgcctattaacgtgatgttcgctttcatgtctggcctgtattcgtactggaaataaaaccagaaccctaaccccattagcagaaaaactattctcagcgccatcgaatccccctttgaaatttagctgattcaaatgttccgatatagttcctcttgccggaatcaccttttttctcggctttccagtctatcgtggaagcgccagccgtgtatgtcgtggcatccgtaaacacccggccgctgtacccagattcattttgccagcctgaccatgctgcggaagcagacggcgcaacggccaccgctcccgtaagtaatgcagctgataaaatgattgatttgaatagttttttcattattttcccctccctaattcacaaataattaacatttatttacaaggataatcgttattttgctcgaattcttactgtgttccataaaaaaccaaaggagtggtttaaaatgaatttcaaaaagactgctgttactgcactatcgattcctgtattagctttttccattagtggtatggcttccgctaaggagataactcctcaaaaaaatgaaacgcaaacaactatatctcctggtccaattaaagcctattacgatacctttgaagtgagagccgggggttctaaacaattagatgccaaatatttaggatcaggattcgcttatcattcagataatagtgctgtttttacagtagataccaatggacttgtccgtggcaataaagttggaaatgcatatttaactatattcaaaaatggatcagtatacggtcagttacacgtatttgtctattaattttctaatagaagagcattctaatatgctcttctatttttccacttcaccacccatgcagcgcccacaatgcaggcagcgggcatctgtgcggatttctaaatcaagttttttataattgcagtccgggcaatggtattcgatcatcccgtcaccccatcaatcccggcaggacagcaatagcgaagaagaaaagccccacgcatgccccgaccagccagatatttgttttatcccgtttagcgataatggtatcgccgatcatttttagatcgtcagaccgagcgactagcgtcgggatgtaatccgggtgaaccttcaaaagctcggccgcctgctcgacagtcattgcttcgtccttcgtggccttcacgttccgttgtagttctacttgtaatggcatcattctgctgcaccctccaattcgttttgggcaactgttatcgcgaaactcagattagtaatgatcttttctaatgcctgtttgtatcgtttcctatccccgcttagacgctgaatgtccttttgtgcctgtcgaaattgatgaactgttacttcctgctgacgcctgttttcctcgatgatttcctgctgcttaacagtctgttcagcttgctcaataagccaagcaatttctttctgaggaatgtatgtcagttttttcagacgttcaattctttcatgcccgttcctcccccgcagggggaaacccctgctatttgaatttatggccgatctcgtaatcacaacgagccaggccgccttttattgtttgaatgattgttttaccgtgttccggggcgtccattagatgagctgtcccttcagtgccatctaaaacgatgatgcggactttccccggctcgatgctttgctgaatagttgtttcatgattttttatttctgttggcttgttcactctggccgccccctgtgctatgatagaagtaccagttcatatcaagggcactgaggcgcagcttcggtgctttttttcgttttacgacggcagccgcatcgttaagccggcagatggctttaattcctcacggtagatgattggatgcttttcgacgtatgccgccaactgctccggcgtcattttccactccttaactggaccaggcttgtatggatcgattttttcttgcatagcgataacctcctgaattgattttgggaatttctgaacctccaagctttttgcaatccgctcccatgcggctggcgcatcgtttgtaatcggaacagagcatcatgcaagccatgagcttatcttcttcctgcacccacaacggccgatcgtctgcgattaccacgttttgcagtggtcttccccgcctttcttttgagtttttttagctcgtccagctcaatgaagccgagtgacttatccagcgccagcaccttgagtggcttatcgtaaagccgctcatacagcttgcgtttgatggcaaattcctttgtttctacacccttgatgtcaatgatctcaatgcttccgtccaagttatgaacctcaaaatctgcaatatattcaatcttccgaaaagttttgccgttctttttgaatgcctcttgaagcaagaaccgcggttgcagcttaaaatctttgatctgcttgaacgccttataccatttcaattgctcatagtatttagcttcggcccggctatcgaacgtgatgccgtccacctgcgtttttctggcgccgtacttattcgtttgcatgtgatgcctctaaaagctcaggattttggtgaatattgccgatgacttctaaatcaacatgagctacaaatacagtagtcaagcctcgctttattcgcttgaatctaaaacctggcacctcttttgtccaatagatcccgtctgaagcatgttcagccacttcttcctgccataaaacttctaatagctcatttgaattatcacggtggttccttacaatgtctccctcataaatctcccggccgtttttgtccttcaatccggtgtattgcattaaaggtgatacatttgaaaactcgtttttgaaataacaagctaactcctcttcgtcattattgagaagttcatcccagtcaagcattcgcggaaattcttgaccgtctcttttctctgtatgataagcccgaaacttaatctctctcattcttccgcctccatatctctgactatttccttatcggcccgttctcgcgtgccgtcgttacctaccgtcaatttgttcccagtgctgaatctgcttttccttgtacggcgccgtgaggatgatggccggcagcaggatcaccgctttaagcactgtgcatcagctccatttgtttgattttttcctcaagcacccggatcgccggggtaaggtcctggccggccgtttgctcggctggcccgaacagatacattccgccggttgctgtgaaatttacctgtttatccatttctcaatcccgccaatctatgatttaacagcattctgtctcccttgatgatcacaacataatccgcacacatttcgtaaatccgggtgccgagcgcctcgtctatctttacgatctgctcgatattcaactcgcttgaaatcaagatcggtttatggttcagatagcgatagttgataacagagtatgtttgctcgacctgccaatcggtagcccgtggcttcccgttcagaggcttgaacagatcatctataaacaggacttcaacctctttcattcgcttgagcttttcttccagcttgtcaaaatcatctttcagatcgttgaatccttcgacgtatggaaaatactgaaccgcgatattttttgatttaatcagcttgttagatattgcagtaagcagatgtgttttgcctgcccctggctgaccgagaagggcaatgctgttgttgcgagtaccgcgtatgttatcaaactccttgtagtattcgaccgctgtatcgtaagtcactttcaccatttccggcttcccttcggttacaaaattcttgaattgcaacctttcaaattccggggtgatgtcactggaattcattaatttccggatgcggcgccgctcaatgcatccacaccgtacccacacttgataaccgtccttgttttcgagatagccgagttcgtctttgcatacctgacagtcatactcagccttttcttctgaggcggccgacttgtccgccgaaaattgagccgacctttcctgaagttctttcatgactgccgccatcgcctcgtccgtactttgtgttctgttgtttgttggcatactgctgtttctcctttcgtctctggctgaatgggtttgagaggattgcttcaatgtaattcagattgacgttgttgcccttgcttctgaaagcctgtttcattgcctccatgactttctcttcaccgtaatcatccaccatatacccgagccgctgaacctccatcgtgccaatggtgcgggctgttttgttttcgaatagttcaaatgcatttttcattttttcgtcaacctcctgctgtcctaaaggtattggagccgggtctatcttcttgttgtaatttccaagctgtatgtactcggcataattcaacaccgtcacaatgaaaccacgtttttgcggcagccggtccagcttcaaatactcttgctttaccatccgatctaacgagtatttgatctgatcagaagaccagttgaagcgcttggctaaatccacaagcttaacgattgtctgcccgacctttagttcttgatctgccctgtactccgcccgtttgaataaataatcgtatattgtctcatcacgtgaatccttaaatggcagccgaggtaggaccacataccccaaaccttgcatatccatgccgctcacctacttcctttcacacagtgctgtcagagccttgaaatctatttctactaatctcagagacggctcatttgtctttaagtagtcagtcgtgtaccgggtatacaagtcctttctcatgtcgcgctgaaccgttttgaccagccagagataacaatgtgggatgggaatcctgatcaactccctttccatcagctcaccaactccgaaaaatggatgatgctgttcagttgattagtggcccggcaatacttgcatttttcgcatcgctccggcttctctccgccgtgtttcacttgcaaaatccgatccatccgctgctcaatctcttcaagctctacttccatcctgccttcatcaatattgatgacagctttatcaggtggatcttcttttgaaacccctacaatcaggggctcaagccattcgttacgcccagtcatccgtttttcaatctctgcgtaaagcgccatctgagcgatgtatccgtatgcctcaacaaaagagcaatatcctatttccgggtcccaaactttctcccgcaatgaccgcgctgttttcagatcggagaaacggccgccagctgggttgtatacgtccagctttcctttccacggaacaccgaacaattcagcagttacgatgacttccttttctccttgcaaaacgaacatacagagttcgtcatgttgaatcgcctcaatcatcagatcagctaactgatactgcttgtacagctggcccttttgtgtaaaaagtgatggggtgttctttttaaattcatcaaaagcctgttcaccttcaagccaggcatgaacatattggccgaagaggagcgcctccgatgtgggcggcgtccattctccgttcaactttgccatagtagcagcctcgcattgcaaaaagcttttatattgagaatttgacatgtagtgtctatcaatctcgttagagtaataattctccttgttcagtgccggtatccgcattagcaggatcacccgccttttctttactatcagcaggcttgtcagcttgctctttctgctttttgaattcttcctcagcctttgatttagtcgcgcctgtggccttcacattgaagtaatcctctttcttcgccatcccatcacgcagggacgtgtaaatacgaccaattttcaagaaatcttgctcagtgaaggcgtcaacgttactgccgatgtactcctgaatcatttccttagtgatgccaaactcttttttaaatagggagaaggcgcttctgagccggtcttccagtggttccttatgaccgctaatcaatgttttttgacacatatctaccgccgcatcaacgatatctcccggaatcactcccagtatgcaggcgcgaacccggcgggctccttgattggcaaccatttcgtaaatatccctcggatcatcaagtttggtaatggagccccgcgccttccgttcatgcttcacagtgaaaattttggtttgccgggtattcgtttcaagatcccaagcgtaagccatgacagatgattcaccagctttttgttccaactccataattccgtaatcaatgttcccccaattctgagccaaggcctctgccagtcggatagatggaccggaaacctttgtgccgccgcgaggatattcatacaccgcattctcggccaagagcctccgctcgcatgcttttttaatccggtcaaaagccgcatatacgtcccgtgggaatttctttgcgatgaccattgccgcctgtacttcttgcgcctgtcggcttaccatcgcttctgtagtcacgccagtagcctgctgaggggctggcatgtaatctgagtaatctacctgagatagtccgttcattgtgcttctgccacctttctcaaataagcttctgtgccgagccgctgccattctcggtatgcatccattgacggaaaggaaaatacgggtttgcctttactgaacatgattgagccgccgacttctctcaggcgcttctgatcgtccgcccggtcactgaaagatgctgttattcgttttgccatgtgtaaaacctccattgtctttaatgaggtaatttggtataataaaggaactaatctttaccaaaagaccttttgaagtccactctgccaagtgggctttttttattgtgctgaatgaaacctaaatccaagttgctccttcaaatagcgtttaagattgtcttgtaaaatcacttcgccgctgtcaattacataattatctgctgccgttacttcatcaccaaaaaagtccttttttgtttccgattcagtcgtcttgtcatgccagttgttcagaaccattggattttcaatattcattgtgaacacctacttacaacacttaggtgaatcccgcgggccgccatatttaagacagtttgatgtaagcgccctttattcgccagccggttaatatcctctgtaagaaccttgatgctccctgcaaggctgatagcttcttcgtaatcaccatcccgtaatgcctccgaaagcatgatagagagctcttccgcggactcgatttttctttttgctgaatctgcatctactttaagaaactgattgattttcataccagtaccgcctgcctttcctctgtttttgccattgcaacttgactcattagcgctttccgtgtccacctttcggccagttccttcatgtttagtccatgactgcgggccagcgaatatatcagcgttttatttgccgggatcagatcaaaaatctgtttaatatcggccattggcagttcttcaggttgtcggcctggcctatcgtttgccagccagcgcgctaaatgccttgttgcttgcaatgcttcttcaagctggtgaatcatattgattaccgccgcgcttgcgctctcgttaagtgctggatctattggcgccgccgtcgtcgggtgcagtttgaagaggtaatgtaccagatcaatatgttcgtatgcctcgcacgcctcaaaccacttgatgcataattccggggtaagcttactgaatccattttcaacgtccgaaacataccgctgatcctttccccctatcaaattaccgatctgatactgtgcaagtcctgccgctttgcggacactacgcatgatccggggtagattatgcaaattgtatgggttgttctccatatgtttgcctcctgatatatccagttgttcactggtaaaatttaattaatgaaggaactagcttgcttgctgttttctcagcttgtcgatgataaaggcctgtccctttggcgtaatgcggatagtcagccatgatttagatgaaccgtttacttgtcgcactccctgtgctatctcaaaataaccacggtcgatatattcctggtatggctcgttcttgtttgccaagatcatcttccactcgcgtagcttttggaacagccgtttttctccaatgctgataccctttttagatgcaagcttcgccagttccctcacaagtaatgatttttcagatgccatacaactctctgcaaagttgatcagtggctgctgaatcttcagtgtgtgctgaagtcgttgccgctcttcctcttcggtgatccatcgctttgcccggctgatcggatcatcaatcatgtaagagggctgattgagcctttgaagctcattttccattcggttaaattctgcaatgtatttttctttaaacagtgcagcctttgcacccgtgtaaccaaaaaccaagaatgtgagtccatcacgttttatgagatattttttgtatgtgcggtttcggtcatcctgatagtcaacctccgcaaaattgtggagattaaattctttgctggaatcaaggtttctgatgtcccgcaggaccgtgtcatgccgtttcccgaagacttcagcgacagtcaggctgtccgttacaacttgattaccttcaatgaaaacgagttgattcaccctatcgcctccttcataatcgcttgttcctgagcttcaatccatgcatcaatgttatgtttggtaaagaaaatgcgattccggactcggaagtgtggaatttgtttttctcggaccatcgtgtaaattgtgtcatgatgaacgccaaggtaatcagctgtttcctgcacagttaatgtattgcgtgtcatactcggcctcctaagctgtatttgtatgagattcttgtcctttttgatttaaaaaaagctctttaatatcacaatccaatatctcagcgactttaaaagcatcttccattttaggagtggaatatccattttcccaattggaaacagtggattttttatacataagcttttcggctaaattctcttgagttaagcctttagcttttctggcattcacaagtttatagtttttcattcgctcacctcctgtataagattcttgtactttatgttttcattataagtataagaatcttgtatgtcaacaaaaagtatgaatttcttatacaaatattaattcacttctcatttgttgtacaattaccttgtacttcgatatggaggaaaatccaaatgttgtctaaaagattaaagatttgccgaaaacaaaaaaaacttactcaaactgagttagctgagaaagtcaaaaccaccaagggaactataagcaattatgagaacggacacagtacaccttcaaacgaaatgttacgtgaccttgctgacgctctcgatacaactactgattatcttttaggtagagttgataatcattcgagtgttattaaagaaacatcagagtttgaacaagcgttcggagatgatgatttacaacttgcgtttagagaagctcgtgatttctcagaagaaagtcaaaaacaggcaattgattttataaagtaccttaaagagaaagaagaacgcgaaggccgaaagcctaaaaagtaacatactggtgaaacctttatttatattatttattatgttatttctgtttactaataagatcgggattggatcggaattaaatctgaactggatcggaaaagaatttttcaccagtaggttgaagccagttatatcaagggatataaaattctttctcatccggattgcatctggattcaaacgggatcggatcagaaaaaaagtaggaagttcaacttgattactataaaggggaaattcaatttgtcttttttgtcagagaatggtgaagtgtataactgtcaattcaaaaaacacatgaaggcttctaaaaactttgtaaaaacttataaaatgatgcttagtgagctaaacgaaaccgtattggaaattgcaagaggtagcttgaatagacctaaagttgtcagcatgcctactggtatatttgccgtaacagatgattatgtgtatttcttctatcttaaaaaggatgcactgattacagagaaatggccttacgattctattttgaaaatgtctgttactaaaaaagctcttgctggttatcggatagattgcacaacttcagatggagaattcagtatcactaacataacagaaggaaatccagaggcagtaagtaaatatgtagaatccaaaattactggtaatgaagaaaaattcaatctggaaaaagaaaaggtcagccaagaacaaaagaaaattgaagaagaatcgaaaaagcacatcaaagagtattattttaaatctgcaaaaacaacaatcacacttgatggaaactatataagagtagcaagaaaaggcgctgttaacactatcacacgaggatatagtggggagaaatcttatagaatcagcgaactgtccggtcttcaaataaaaaaaccaggattagtaacctctggctattttcaatttttaacaccagctgccaatgaaacaagtggactctgggacgcaatacaagacgataactccttcacttttggtccaaatgaattgccgatggtattagaaattcaaaattacatagaagagcatcagtctatgccagctccaacaactgcaccaccagctcctgcccctactgtatctgcagctgatgaactgaaaaaatataaagaattgttggatatggatgctatcactcaagaagaatatgaaattaaaaagaaacagctattgaatttatgacagccctttttcctcgggcttttctttcacaccaaaaacagaacatatattccctacatggtggtgtttttaatgtcaattcagttatcgtacctcgaagaagaagtgaaaaaaatctatcacaaattaaatattgaaactcctgaagacattgatttagaaaggattgccgcggcatttcgtatctggctgcattatgaacaaagagaaagctgcatgtttcaaattaacggtgagtatagcgtcgtccttgatgctcgagcctctccgcaagaacagtggcaagactttgttcatgagctatgtcacgtcttaaaacatactggaaaccaatttcacatgaatagaatgttcaggcagcttcaggaataccaggcgaatagtttcatgtatcacttctgcgtaccaacgttcatgctcataaaaatgcagctgccccgtcttaaatcagaggccattaaattaataggagatacatttaatgtgacatattccttggccgctaaacggctagaaatattcaacagaaaacagttttcaattctctggcataaaaatcttcatcaaataagtaaattgaatgttaggaggtagccaaatggccagtatagagccccgtggaaaaaactcttttagattaattgttgagaatggttacgatgccaaaggtaaaagggatagaagaaagaaaacaattcgtatagaagatccaaagctgttaaagactaaacggaaattacaagagtatcttgaggaccagctgcaccgtttcagaattgaagtagaggccggcgagtatattgctccggaaaaatccacttttgattcatttgcagaaaaatgggttgaaaagaaactctttaataagaatggtaagccttactcttttacaacatctgttaaatattcaaatcacttaaaaaatcacattcttccagcattaggtcataaaaaaatagacaaaataaaaagccttcatattgttgattttatagatgatttatctaaagatggggctagaaaagatggaaagcctggcggattaggtgatcaaacaatcaaagatatttttaaaatcttacaagcattatttaaaactgccacagaggaatggaaattgataaaagacgatcctattgagggattgagttcgccagaagctgagaataaagaaatgaactttcttgaatctgacgaagcagctgaatgtattaaagtgttgtatgaaatagatattaaatggcgcttatattatcttgcagctctgatcggggggcttcgtagaggggaagctcttgcctgtgaatggcacttggatatagattgggacaaaggtggaatatacgtaaatagatcaatttctaaaacaattaacggagagcctcatgtcaaaagcccaaaatcaaaaagttctcaacgattcgtcaaaatgcctgatttttatatgaatgagctggctaaatattatcgcttatggaaaaaagaaaaattattgcttggcgatgcctgggaaggcggagaacatcaatatgtgtttcacagtggtaaaggaaaaccttactactatacaacccctaccgcaaaatggactaaaatcaaaaagaagtacggtctaaaagatgttcgtcttcatgacttgcggcatactatggtggctctccttatggaagctggcgaaagtctcagtgctattcaacgaagagctggacatgccagtgctcgaacaactagtgatatttatggtcatgttaccgagaaactcgaaaatagcacagtaaaacactttaaccagttcgatcctagaaacctagcacaaaaacagagttaattttgaaattcctcttcaaaatcagctcaaaaaaataatttcgtccccaattcgtccccaactcgatgaatgatgacaaaatcaataaataagcaaagtaaaaaacccttgcaacgcaagggttttggctatgattccgactgggctcgaaccagcgacctctaccctgtcaaggtagcgctctcccagctgagctacggaatcatgatatgtatgtgttgctgggtatgttgttgtctctctgacatttataattatatatcctgatttctcattcgtcaacactttttttatctaaaataaaaaaagggcgcgtcataaaattgacggcgcccttttcgtttatgatctcacttgggcgggggttatttttttcaatgcctgttcgaagtcgcgttctaaatcttcggcgttttcgactccgacgctcaggcgcagaaggccgtctgtgatgccgcgtttttccctttccgcttgcggcatagcggcatgcgacatggctgcagggtatgagagaatggattcgacggcgccgaggctgaccgcaaataccggaagcgatacattttcgaccagctttttgacggcttctttgctttccaattcaaaggacaggacggcgcccgctccactcgcttgacgtttatgggtatcagctcccgggtgtccggcaaggccgggatagtaaacgtttttgacggcgggatgcccgtcaaaataggcagccagccgctcagccgtccggctcgctttttccagtctgacctgcaatgtttttaagcctctcaatacgagccagcagtcctgaacgccgagcaccgctccaaatgagttttgcagcttatacagctgattgccgagctcttcatcctttacggcggcaaggcctgacagcacgtcactgtggccgcttaaaaatttcgtcgcgctgtgaagcacgatatctacgccgagatcaagcggccgttgcagtgcaggcgtcatgaatgtattgtcaaggtatgtcagacagccgtgatcctttgccagtttgacgacgcccgtaatatccgtgatgccgagcgtcgggtttgacggtgtttccatataaatggctttcgtgttcggccggatggcgcgggcgacagcttctgtgtccgtcatatcgacaaaggtatgttcgatcccgaaacgggacagaacctcagtcaccatgcggaatgttccgccgtacacgtcctccgtgacgaggacatggtcgccttgggataagagcagaaatgccgtcgaaatcgccgccataccggagctgaaagcaaaacctctcgttccgccttcaagacctgcgatcgtttcttcaagcgctgttcttgtcggtgtgcctgagcggctgtagtcatatgtcccgaattcttcaaatgaagactgatggaatgtggaagcatgctggatcgggacgctgacggctccggtggctccgtctgttttaaatggattgtgcacgagctgggtttccagcgtccaattgtgattactcatatgacacggccccctcttttacttgctgtaatgcctgctttacatcccgcttcaaatcttctgcatgttcaatgcccactgaaaatctcagcagacggttgcagacgccgtttgcgatacggatgtcttccggaatgtccatgtgcgtctgtgtcgcggggtatgtaataaagctttccaccccgccgagactttctgcgaaacagatcgttttcagcgcctttaaaaacggattgacccattcctctttttgcagccggaaagacagcatcccgccttttccgggatataacacgtcggcgatttcttcttcctgttctaaaaattctgcaagttcacgggcgttttcttcatgacggcgcattctgagtccgagtgttttcatccctctcattaaaagccacgaatcaaacggcgggagaaccgcgccgatcgcattttggtgattaaacatgatctcgccgagctcttcatccttaacgacagccagaccggcaaggagatcattgtgccccgctaaatattttgtggcgctgtgaatgacgatgtccgctcccagttcaagcgggcgctggagcaccggggtataaaacgtattatccacaattaaaagcaggccggcttctttcgtaaaccgggcgattttttcaatgtccgcctcctgcattaacgggtttgtcggtgtttcaacaaataccgctttcgtgttttccgttattttggagcgtaaacagtcttcatcgctgaaatcatcgtaaataaagcttaagccgtattttctccattcgttttcaaacaaacggtacgtgcctccgtataaatcggaggatacaatcaattcatccccgcttttaaataaagccataatggtttgaatggctgccattcccgagctgaaagcaaatcctctcgcaccgttttccaacacggcgatggcgtcttcgacgagctggcgtgtcgggtttttcgtgcgcacgtaatcaaaacctgtagattctcctattcctctatggcggtaagcggtggacagataaatcggcggactgaccgttcccgttgcttcttcgcttctatttccgatttgggctaattttgtatcaacatgctgcgtcatcagtaagcaccatcctttttcaaaaataaaaaagccccctcttcataagaagaaggagcttttctcttcctcttatcttccaagcatgtgaatcgcttgctggatttagcaccttggcactttgccttcccgcggcaaagcaaaccggttgctgaggtttcaaagggccagtccctccacctctcgtgataagaatattgttttgtattttctgattgttctatattaacgcactataaaatgaatttcaataactttttatttatctgaactctcgcaagaagtgcatctgaagaaagaaatttctaataattcatggtacaataggaaaaaaccattaagacaagaagcggcctggaggaatgcgatgtggcatcaaaaaacggaatcattcatgagaaaaaacttttctcccatgagcttgaagaggaaatgaccgttttggtctacctgcccgccaccttctcccccctgtataaatatcatacggtcatcgctcaggacggccatgattatttcagattagggagaatcgggcggcaggcggaagagcttatgtcaaaaggggaaattgaccgctgcatcattatcggcgtcccttataaaaatgtgcgggagcgaagaaacacataccatccagaaggctctaagttcgcctcatataagcggtttatcgcaaatgagctcgttccttttatcgacaaagaatacccgacttatcaagtcggatacggccgcaccatgatcggggattccctcggcggaaccgtttcgctcatgacggcgattgactatccgaacatgtttggaaacgtcatcatgcagtctccgtatgttgacgggcacgtgctggatgccgtccggcagtcggaggatctcaaacagatttccgtttatcatcaaatcggagaaaaagaaaccggcgtccacacgacggacggccaggttcttgatttcaccgcgccgaacgaagagctcaaacagctgctggaaagcaaacagtccgaatacacgtatgaaaccttcgacggggatcataaatggacctactggcagccgctcatcacgccggcgctgaaaaaaatgctgtaaccattcatttaaggagggaactttcatgaaatacggtattgttttatttccatcaaaaaaattacaggatctcgcaaattcgtaccggaaacgctacgacccgagctacgcgctcattcctccgcacctgacgctaagagatccgtttgaagcgacggaacaggaaatcgagcaggtcgtatcacagctgagacagacggcgaaagagtcgcatccgctcgttctgaaaatcacaaaatacagctcgttttctccagtgaataatgtgatatatatgaaagcggagccgacggaggaattaaaatctctgagtgagaaatgctactcaggagcattatccggcgagccggaatacagcttcgttccgcatgtcacggtcggccagaagctgtcgtcagatgaacattccgacgtactcggacagctgaaaatgcaggacatttcccacgaagaagtcatcgaccgttttcacttgctctatcagctggataacggctcatggactgtgtacgaaacatttttattaggcggaggagaataactgtttggaatccatcatcgcaaaaactgaaaaacagctgaacgacgcttttttcgtcagaaaagaggtcttcgttaaagaacagctcgttccggaagaagaagagattgatcaattcgaggacacatcagagcatatagtcatatatgacggcggccagccggtcggagccggcagatggcgcatgaaagacgggcatggaaaattagagcgcatctgcgtgatgaaaagccatcgttcttcaggcgtcggagccatcattatgcaggcgcttgaaaaagcggctgcagccaagggcgccgacagctttatcttacatgcgcagacgcaagcggttccgttttacgaaaaacaaggataccgcgtcacatccggcgaagaatttctcgatgcgggcatcccccatctggaaatgataaaggaacacaaacgataaaatcaacagcactcctgtttatagcaggagtgcttttttttatgaaaataatactatttcatgaattttattgaattttatggaaggttaatgtatgtttagtatacgaagtattacaattcatacaaaaaatacaattcatatttcggagggataaacatgacggcaccaaaaggaaaacacatattcgggactgttaaagtgggtacaaaaggacagattgtcattcctaaagaagcaagagatgttttcgatataaatccgggggattcactgcttatgcttggggatgaccagcaaggtatcgcacttgttaaacaagaactctttttcgaatttgcaaaagatattttaaacgctaagcaaatcgatgaagatagcgaggatgagtaaatgcacgcgattgagctgaagcaattaacgaaacattataaagaaaccgccgccgttgaccgtcttgagttctcagttgagaaaggggaatttttcgctttactcggtgagaacggagccggaaaaacgacattaatcagtatgctttgcggactcctttctccggatgacggtgatgcatcagtgcttggacacagtattttgactgatttggataaaataaaaccgaaattgaatatgtccccgcaggaaacagctatcgctcctcatctaaccgtacgggaaaacttagagtttatagccggagtctacggaattccaaaaaaagaagcaaaaaaaagaacagatgagatgctcgaattgtttcaattaaaagagaaagaaagagcaaaaaccaaaacattatcaggaggaatgcagcgccgtctcagcattgcaatgggaatgatcaccaagccggatatttatttcttagatgagccgacattagggctggacgtccgttcacgccgcgagttgtggaaaaatcttgaggcattaaagggtgacatgacgattattttaaccacacactatttagaagaggctgaagccctggcagatcgtatttgcattttagaaaatgggactttaaaagcactgggtacggcggaggctctgaaaaagcaaactcattcagccacatttgaagatgcctttttagcgatttgtgacggggaggcgggtctttatgcttgatttcgccattcgcaaccgcaaagaaatttttcgtgatcccctgtctattattcttggaatcgcactgcctgttattctattgtttctgtttacggcgattgaaaaaaatgcgccgcttgatacctttaaaattcagcatttagcccccggactcattgttttcggttttgctttccttacaatgttctctgcattgctgatcgcaaaagacaaacagaccgcccttttgacccgtttgtttgcttcccctttaaaaacagccgattatgtcatcggttatgcactgccgatgctgccgttagccattttacagatcatcatttgttttatcgcagcagcggctgccggtttatccgccgagtggatgaatcttctcgcaggtatcgctgtcttgctgccgattgcgatgatgtccgttttcttcggtttatgtttaggggctgtgtttacggacaaacaaatttcaggtatcggaacgatttatattacactcgtgcaatttctgggcggggcttggatggaggtgagcctgctcggtgacacattcaaacatatcgcttatgccttaccgtttattcactcgatcgagctggcccaggaagtcatatccggagattattcttcctttcatcagcatatttggccgatagcgggatataccgttttggcgcttgcacttgctttcctcagttttatgaaaatcaggaagagataaaaaaagccggcactccgtaatgggagcgccggtcttctttattacgtttctttcagaaggtttatcgtatgcggcagcagacggtcatcccccgggctgccatggcccggaacgacaatgctgatgtcctgatatcttttcatgactttgctgacggcgcgcggccactgatccggataaaagcccggagtaggcacgatttcctttgtttctaaagccttgattaaacatccgccgaataagagcttatcctcaggcagccagacggtcatattgtcttccgtatgcccttttcccggataaaacgtttcaattttcatatcgccaaactgcagctttgtcacgtttttcaaatctccgagcggccggtcatatccctgctgtcgggcgaagtcggcggtcagcttcgtgctgtgcacctttacaccgtatttgtacagggtgttcagaccgccgatacgatcgtcatgggcgtgtgtcacaatggcatcggtcatccttttgccgggaaaccgctgttttatttgtgtcattaattgctctgtgagactgtcattccacggagtatcaatcagtacgattccttttgaagtctcaagaagcaatccgttcgcagggacgggacttccgtctgccgtaccggtgcttgtatgcatccagacatgcggcgccagctgtgtgagagtgacatcttttgctgcggagctctccgccgcgtgtgccggtttcattccggcagtaaagaggccgaatagaaataaccccgcaatcaataatgaaagctttctcaaattgaatcattcctttccgcatctttcatatatacgacccaaaaaaaacccggatatatccgggctttttcacacgtattgatttatcaaccggccttttcccatgatttgcggcagacgggaaagagagcgcttacgtttttcctcatgtactttcttttctgcggctgcggtgttttcctggcggcgctccacctctctgtacaacctgtcattggcgagggcggccgctttcgtaatgccggcgtaatcaggcttataacccgctgcccggtttgcgtattgagaatactgctggttttgaatccgtcctgcataaatcatatgtacccctccccttcgcttttcatttcccttaatcttactttttgaaacgctgttcttttgttatgatattctttgtctatcaaatggatgaacaccttttaatgggaggacccctttttgaaatgcgcccgactgaataaccgaacgatacatttacatacatattccagagaacattaccaattcctttttgaagaagctcaaaaaggaaatattttttgcgcacattgtgaccagcccgtcttgatgcggctttcgattttagagcagccggcattttatcaccggcaaaagggagacttcaccgcctgtgaaaaagcatgcgcggccgaggaaccgcaagcggagaaagaaaaagaagagtataaggaagccggcatgttccgcctgccgaaaggaaaagcgatttcagagaatccgaaaccgatcgtctcagaatggaaaagcccgaaaaaagtgcctgcggccgaaccgttttcaccaacatccgaggcggctgatacatctttgttccccggcatcggcctgaaccgtgaacagatgaaggcagttactgaaacggacgggcctttattagtgcttgccggagcgggaagcggaaaaacaagggtgctgacagcacgcgccgcccatatgattgaacacctcggcatttcacccgagaatatgctgcttgtgacctttacgacaaaagccgtcgccgaaatgaaagagcggatggcgaatgagtacggtctggcagccggaaaagtctcccgtctcgtgaccggaacattccacagttttttctataaaatactctatcattatgattcttcaaaatggaacggcagccagcttttaaaaatggagtggcaaaaagagcaatatgtgaaaaaggcgctctatgaagaaaatttggatgaaaaagagtttcccgtcgaccaggcgcttcagcttatcggctgctggaaaaacacgtatctcccccatgagaccattccgcttgcggacgactgggagaaaaaagtgtacaggctctacgaacattacgaacggcagaagcgggaaaaacaccaatttgattttgatgacatggcccaaggctgttatgaactgtttcaaagccggcctgatattctcgcgcagtaccaaaacagattttctcatatcttgattgatgagtttcaagatatcaatcctgtccagtacaacattatgcaaatgatcgcaagcccagagaataacctgtgctgcgtgggtgatgacgaccaatccatttatgcgttccgcggcagcagcccgtctttcattttagattttcagaaagattatccggcagcaaagaccatttacttaacggcaaattaccgatcgccgcatccgatcgtctcaagcgctcataccgtcgtaaagaaaaataaaaaacggtatgaaaaaacactttctgccgtaaaagacggcgttcataatcccgtgatattttatccttacgatgaagaagaagaagcgaccatgattgtttcagatatgaaagagaagattcaaaacggggcgagccctgacgattttgccgtgctttaccggacaaacagcgccggacgggccatttatgaaagactgcatcaatcatcgattccttatcatgccgaccggggcgtgcagacgttctacagccgcagaatcgtacgccagatcctcgcctacttatatgcgagtcagaatgaagatgatccggatgcggtgaaagacctgctgcccgccttatttttaaagcaatccgccctgcaaacgttaaaggcgctgtcaatcacggaagattgcacgatggttaaggcactgacgaaactgcctgacctgaagccttttcaaatagggaagatcaagcagatcgttccgtttttcgcaagcatccggacaatgaagccggttgaagccatcacctttgcagaaagcaaaatgggtttttccgagtatttaaaaaaacggggcaatgaggggaacaaactggaaaaaggctctgatgatctcagggatgtcaaagtggccgccaaaaaattcaaaaccattcccgattttcttgcgcatgtcgatcatatgcgcgccgctgagaatctgaaaaccgatgaaaacggcgtcgaactgctgaccattcatcgctctaaaggtcttgaattcaatacggtctatattttaggcgcggctgacggctcgatcccccatgacttcgcgcttgagacggcgagacagggcgatcccgctccgctcgaagaagaaagacggcttctgtatgtcgcaatgacaagggccatgcagcatttatatgtatcttgtcccgcgtacaggcggggaaaaacagcgcgcagctcaagatttctcgagccccttcttcggacggacagacggagcgcactcaggatataaagaacccggcagatcactgccgggttcttctcacataaaaaggcctttttagcaaggccggctgacgcctatttattgttcagcattttagaaatggtgccaaaatcaagtttctctttaccgcttgtaatagattgaacgattttgtcttccaattctttcggaacacgcttgttagccagctgggacaccttctgaatgacgcctctcaccgtgttttcatctttgaaattggcattttgcaatgatcctgcaaggttcatgacatccttcatgctgacgcctgttttcttctcaatatttttgaaaaattgattatccatggtgtgcctccttttgtggagtaatacgatattgtatgaataaagagcggaacatgtgcccgtaagacaaggaaaaaattccgagtgccccgtctctatactccttcatacatcagggaagcacgggactgaacggtcccgcgcttatccaaggtcttgctaaggtttagccaaaaaaggatgcaccgacaatgatcagaaggatgaacaatacgacaacaagaacaaatgttgagccgtatccgcctccgacatagccgcctccgtatccgccgcagccgccataaccgccgtagccgccgccgaatccgccatatccgaatcccatatctaagcacctcctttactctctatactctatgtgagccgacttgtttggcttggataaatgcatagggccggtgcggatttcattcattttagtgagaatgctcatttttcttcagttttgcttctgtttcggcggcaaacacatctatccattcctcaaagcgcgatcccgcttcatcaaactcagacagctgcttttcaatagataagataatatatttgtcatgctcccgctggttttgattgtgccggcggtatttaccgtttatgaatgattcaaatatattcataacatcccctccttctatgatctatgccgaacagaggccggcgttcggcaaaaaacaaaaaaaaccggaagttccggttttttagaaaacggctatttcggttttttcttttggccgcagccgcagccttttttcttaatttttttttcgtaaggctgatgcacagttgacttgtatggagaatgttgggaaggtttgcttgattgattcatggtgatccttcctttccttatgtcatatatgccagtttatgcaaaaagtgacggtaagttgctggtggaaccgccttattcctgcagaagacgagaaaccgcagcttcaatgatcccggccgcgccggcaatggctaacagcaaaatcagccattgcgcagcctcgggtaccaaaatctgcgccgcaattaaaaaggcggcacaccacacgcccgtacaccagtagcagctgagaagttcaccgataaatgccctgatgccttttccttttatgacaatgtaggtttctgtcgtgccgtctggtgcggtttctgttttttcctcgtgaaaaaggctccgaagcggcgccataatggtgtcaaatacgaaaagcctggccagccggaaaacggcaaacgataacagaataaatgaaagccaattgataaccacctgttcactccttttcaaaacttgacctctttatacatatgcgaaaaccctgatcttcatgaatcgcaccttgtccggtaaaaaaataggtgcgatttagttgtttttcttattccgctcggcgtttcatttgcattatataaagtatgaatgagaaaggagtgaaggttatgtcgtttgaagaaaaagtcgaaacactgcaaccgcaaatattcgaacaattatccaacgaattcgagcagaagatcgaagtgattgattgcgaaaatgtcacaatagatacaacacttataacggccgctctttcaatacaagcttcagttactacggcgattatccttgcgacacagctcgcgatcgcagatgaagacacagccgaccaaatggcaaccgaactgctgatcctcgatgattgccaaataaaaaagcgaaccctcattcaagtcattaacagccgcaatgtcaaaatcacactgactgcagacgatatcatggcctttgtacaaactttgtttcaattattaaatatactttttgctgaactagacatcctttaacctttcttttcaaatatttaaatagaggtgagaacaaatggcagataacgaaaaattaaaaaaagaactcgaaagtctaccagaagtggatccgcttttaaaagtgcttgtcagcaatgtcttcaaaaaacacggcgtgacaaaagataaaatgcgggaaatccctgatgaagaaaaagaaatgctgatcgcattagtcaaagacatgcaggcgaaatcagaagcttttcttgaaagccagagacagaaaaaagagcaggaaaaagcgcaagaacagcagacaaatccaaaaacccgcagagaacaattaatcgaacagctccggcaaagacgccaaaatcccggtcaataactaaaaaatagtgatttttatcaggatagatgcctgagtcaaagtaaggggccggctcatttaatattagtaaaagaaaaggaggaatagatatggaaagcagaccatactcttgggttgcacttgatcctgaatgcgaacatccgcgagaagaaaaagaagaaaaagaaggcagaagatgcagtgtttgctgtaacggaaacggattcggcgaagataatgccttcatcgaccaggacctggctcaagcgaatctcaacaaacaagtttctgaagaagcgattattatcagagactcttgtgatattaacgtaacgtcaacagacgttcaggcagtcgcttcagtcatgacagctcttaatgcagcagtcgtaacagccactctcacttcaatcgctgacggagtcatcgctgaattggtcgcacaagacttattgcagctaacagctaacaaacaaatcaaccgccaaaaactgctcatcgaaaactcccgcggcgtaaacgtgacaacagtagatgccgatatcgcagtgttgatctcaacagcgacaaatacactggttgccatcttagtcatcaccctgatcctctaaaaagaaaaagcagagctaaaaatgctctgctttttcttattttctccgcatatgatgaatatatagacgttcacccacaccaagtgaggctcgcgtacatatgttgttaaagacaaaagtcaaataccctaaaagaaggagctgaaatccatgagctgcggaaaacaccatggccgagatgaaagttgtgtatgcgatgcagtcgagaagattttagcagaacaagaggctgttgaagaacaatgcccgactggatgctataccaatctgttaagcccgacggttaccggtaaagataccatcccgtttctcttgtttgataaaaaaggcggtttgttctccacattcgggaacgtcggaggctttgcggatgacagccagtgtttcgagtctattttcttccgggcagaaagagtttgtgattgctgcgcaacgctttcagtattgcgccccgtagatgtgcacggcgacaccctcagcgtctgccatccttgtgacccggatttcttcggtttagaaaaaacagatttttgcattgaagttgatctgagctgcttcagcgccattcaatgcctttcaccggagcttgttgaccggcctgcgccgcacaaagagaaaaagcatcacggatagtcattgattcgcatctttcctaaagaagaatccccttccaaccttctattacagatgcaatcatcagcccgcccggacttccgggcggctgactctccgatatcgtttaatccggtatataaaacgtgaagtcaggagggatattatgagcaagcatacaacatactgtgtgcgtgaagcggtagaaaatattgaagacctgcaaaatgcggttgaggaagattgcccggccggatgctattccaaccttttatcgccgggtttttcattaggcgatacagtgccgtttgtgcttttcacttctaaatcatcaccgtttaccgcattcggaaatgtcggcgagctggataacggtccgtgttttaacaccgtttttttcagagttgaaagggtctgtgacggctgtgccacattaagtctgcttattgcttttgacgagcataagcacattcttgattttacagataaagactctctctgcgatgtattccgtttagaaaaaacgaactattgcgttgaagtcgatctccatagcttctgcgccatcaattgcctgaacccgagactgatcaaccgcacacattcttaaatcaaaaagcataaaaataagctgccggattaaagaattcaggcagctttttgtatggttaaaatccaagcggatgcagcgaggtaatatcgtctattgcgagttctgccggcgctccgttgcttgtcgtccgcaggaagatcgcattattttttctgccgacgattacgcctctgtaggttttcccgttggcttctatcagacaaagggtccgcggcatattatgcggcagcttcgttaagaaatcaattttttcaagaatggacattctgctcatcggctttttcacgcgctttggcggaaccttttcctctggggcggcattgtgaaccgcttcaggctctttttcagcggcatcaggctcttttttagaggcgtcaggcttggcagtgtcctgctccgcttgcgccggaacttcttgaacggcttcttctgcgcggctgtgctgttcaggtacttgcttttctggttcgacagccactgctccttcaggctgagttttacattcttcctcccgctttccatgcatcggctcttcttccggcggctgaggcgctttcctttttttgattaatatgtcctgcattgatgattgcgtgtctgaataatccgcctgaacaatatacatgagcggttttttttccgcgtttctgttttgttttgacatcttcatccctccgattctgtcatgttttatttatatgacggaatgattaaaatcagaagaaagaaaaaagcaatccctgaaagggactgcttgttatttaacgtgcggtaatatggaatcctgaatcaacgtgaagattttcgcccgtgatgcctcttgacaggtcactgaacaagaatgcagccgtgtcgcccacttcttcaggtgttgtcgtgcggcgcagcggcgcgcgctcttcaatttctttcaggatagagttgaaatcactgattccttttgcagacagcgtacggatcggccctgctgaaatgctgttgacgcggatgttttcttttcctaagtcagcggctaaatatctcacgctcgcatcaagagacgcttttgccacacccattacgttatagtttgaaacgacgcgctctccgccgaggtaagtgagtgtaacgatgcttccgccttcagtcataatcggacgcgccgcttttgcgaccgctgtcagagagtaagaactgatgttatgcgcaagcaggaatccttcgcggttcgtatttaaatattcgccgacaagctcttctttgtttgcgaacgcgatgcagtgtgcgatgccgtgaatcacgccgacctgctctttaatgctcgcaaagcaagtttcgatctcagcgtcatttgtcacatcacacggaaggatgatggaatcatttctttctaatgtagccgcaaggtcatgaactgatttttccaagcgctctcccgcgtaagtgaaaatgaggcgcgctccggcttcatgcagcgaacgggcgattccccatgcgatactgcgtttattggcaacgcccatcacaacgatgttgcggccttcaagtgagaaattcatatgtataaagcctcctgtaatcgtcttaaagacatagttttagtacctgatcttaatttttatcatatcataacattgtccagattgaaagcatgggaaaaagaccgcggatgttgaagcggtctcttttttatctcgtctgcagactgttccttttaaaggcaaaatgattggtcgggccgtgtcccgcaccgatgccgagcgtatgttccacggcttcccgcacaaaattgacggctgtctcaaacgcggtctgaatgtttttcccctttgccgtttccgccgtcagcgcggctgcgaacgtgcagcctgttccgtgggtgtgtttcgtgtcaatataagcgtggctgatttgggtaaaagacgaaccgtcaaataataaatcaacgattctcccctgttcaggctgatgtccgccttttatgatgacatgctttgcaccaagcttgcaaaggcgttcggccgcttttttccggtcctcaaacgtgcggatttccattcccgtcaatacctcagcttccggaacattcggcgtcaccgcatagctgcgcggaattaacagctcttttaacgcagcctgagattcctcacgcagcagggaagcgcctcctttggcaatcatgacggggtcggtgatgacatgatcaagcccgtactgatccgttttttccgcaatttccgcaatcatttccgcgctccacagcattcccgtttttacagcgtcaggccgcaaatcttccgccaccgcgtcaatctggctgcccagcgcttcccgggtgagcggataaatgccgtggacgcccaaagtgttctgggcggttaccgctgtaatggctgacatcccgaaaacgccgagctcctgaaaggttttgagatccgcctgtataccggcgccgcctcctgaatctgatccggcaatcgtcaatgctttgcatatgctcatgatgtttttcgctcctttcgcattatccgatccatttatgataaaaggatttcgctctgctgatatcacttgtgccgtgtattaatgctctgccgtcacgaaacagtaccatcttgaaattgtctgtgcaaaacgaaattaaatacgggttggctgaaacatcaagccctgtccgtctgagctgtcccgcaagtttttgcagatcaacctgttcggagatccccattctgatctgcaccgtgttccgcccgcacagaaccgccgcttttgtctgattttcataggataaaaacggaaattcgtttgtgccgcagcttgggcaatcagccgacttaagacgggcgacgtttatttctgaccgttcatttttccataaatcaaaggaacggagaacatgctcgatagatccgcccgttaacagcttcagcgcatctgctgcctgaaaaacggccgtctgcaatacagccgggctgatgattcccgccgtatcgcatgtcataccgcctaaaggcaatgtttcaagcagacagtgaaggcacggcgtgacaccgggaatgacggtaaaagagagcccgtagctgccgacacaggcgccgtacagaaagggaatccctttctgtacagccgcatcattcacaatcagcctcgtttcaaagttgtcagcggcatccacgatgagggaggcgccacgaatcaatccgggtgcgttttccgcagtgacatccatgacaaatccctcgacctctacatcgctatttatagatcgaagccgtttttcagccgccgcggctttcggcatttcctgtctgacatcatcttcagtataaagctgctggcgctgaagattactccactccacataatctctgtcggcgatcgttaccttcccgacccctgctctgacaagcatctccgcacttgccgtcccaagcgcacccgcgccgataatcacggcgtgagacgaccggagcttctcttggccggagggaccgatcggctgaaacagctcctgtctggaatatctgtccgtcataccggaagaccgtctcgcggactgcttgcagttccgtaatctttcaccggaattctcccggcttcataagaaagacggcccgcttctacggcaagcttcatcgcccgggccattttgaccggatcatcagcgcctgacacagcggtatttaacagcacgccgtctgccccgagctccatcgcgtaggcggcgtcttttgaagatccgacgccggcatcgacaatgaccggcaccttcgcctgttcaatgataaaggaaagattcagcggatttaaaattccctgaccggaaccgatcggcgaagcgcccggcataatggcatgcactccgagctcctcaagacgtcttgcgagcacgacatcgtcagacgtatacggaagcacgataaatccctcttcgagcagctgttctgatgctttcagcgtttcaaccggatcaggcaaaagtgaccggctgcatccgatgacttctacttttatcatgtcacaaagccctgaagctttggcaagccttgcgattcggaccgcctcttcagcggttgcggcgccagccgtattcggcagaagcgtgtatttagacaaatcaagctgttcgagaaagttaggctgagactgttcaaagatgttcatccgccgcaccgcaaaggttaaaatatctgattccgagacagccaccgcctctttctgaatctcaaaactcggatattttcccgttcctaacagcaatcttgactgaaactgttttccgcctattgttaacatcctcatccgcctcctacaaaatggacaatttctatgacatcgcggtcacacaaactcgtcttttcataattctttttttcaatgatttctttatttctctccacaactacgattctttgatcaagctggtacgattcaatcaaatcctgaaccgtcccctcatttcgattccaatcaatttgttttccgttcagctgaaggatcatatatgaaaagcctccttgcgatcaattcgaaacgcttcttcccattcctgtttgacttgttgcccaaagattatatcccgcaccatttcagccgttgccggcgccaacaggatgccgttccgaaaatggccggcggcgaagatgatgccgctgtcttcaggatgccgcccgataaacggctttccgtctcttgttcccggcctgagacccgcccaaaaccggtctattttcatatgttcgatggcgggaagcatggttttcgcttttgcaatgacggcctcaattcctccgatgtcaggcgtatcgctccagtcaccctgtttcatcgtggcgccgatgacaagccggccgctttttctcgggacaacataacaatgatcatggtaaagggttttggtcagcggggtatcgtcattccacacggaaaggcattctcctttcacaggaaaaaaaggctgtcccaagccgagctggctgaaaaaccggccgctccataccccgcttgcaactgcgactttgtcagcataaacatccccgccggacgttgtgatgcaatattctccgttcacccgttttacggaggtgacttgtgtatgctcatatatatcagcgccatagcgccgcgccccttttgcatacgctttgcagacatagtacggttcgacatggatatcgtcttttataaaacttgcgccgagaatgtcttttgaagcgtaaggctctttttcaagggcatctttcgctgaaagccaggtgacggaaggtagatcatccatcttccgtagacgggcgatatcttcttcggtatacgccagtttaagcattccgccgttatggcgcctgatgtcaatgccgcaagcttcctcaagctcttgccccgccgcttcatacagcctttgactgtgcatggcaaaatcaaaaaacgcatcccggttttcacattccgcatgagcgcccagcattcccgcggcagcgcttgtcgtttttcggccgacttctccggcttcaaacaagacaacgttctgctgcgtctttgccagctcataagaaatggcgcacccgataattccgccgccgatcaccgccgtatcatagtgcttcttcataatcggcctcccttaccgcgcgtgcataccgttttgccgcctcctcgggattttcagctgagaaaatacctgacatgacggcaattccgtccggtttcgcctgctttgtgtgtccgatcgtctgcagtgtcattcccccgattgcgatgacggggatggaaagcgtgcgtttgatctctgaaagcaggctgatgcctcttgcttcaagtccctgtttacattcggtttcaaatacatggccgaacaccacataatccgcatcttccttttcagcttggatggcttctttcagcgaatgaaccgaacgtccgatatgaagatggggaaatctgcttcgcacctgctttacggaaaagctgcgggacggaagctgaacacggtgtatgttggcaaaaagcgcgatatccgccctgtcattgatgatcaatttgtccttatccgcaccgccctctttcaaaagggacaaaagctgcatgatttctcccgctgttttatcccgctcacggatatggataaagcttacttcgcgctgaatcgaaagaatatcctcggccagctcggcaacgggtttgcgattatcagttaccgcgtgcagctccaaaagattccacctcttttccgcccttctcggaccagccttctttttgataggccattccccaaaattgatattcataatagcttgaaatcacaaaattctctttcattttcgcgcggatgtcctctgtgctgttttcagcaatctcgtcaaaacggctgatctgttcttcgacttgctgtctgaaccagtctccgccgtatgtaccgatccatttttcataaatcggatgctccggtttgcactcttttaagtgttcgccgacttcataataaagccaataacagggcagaagcgcagctaatatttctccaaaattgccgctcatcaccgatctgtacatatgagacgtataagaataggcggtcggtgccggtttaaatgccgcacgctcttcttccgtaatccctaaaagctccgtaaactcgcggtgcagcgccatttccgcttcatatgtcccttgagcgtggcccgccatcctgcccgtcgtaaacaagtcttcggcatatgcggcgccgaacgcctgaacttttgcaaaatgcgtcaaatagtaggaatcttgcagcacgtaatagctgaaacggtctatcggcaggcttccgtcaccgattcccgttacaaacggatgaacaaaacttccgtcccaccattcggcagccgccagtctgcattcttcggaaaatgtcatcatgtcttcccccctgataaaataaaaaaaccactttcccgcatcggaaaagtggtttggaatttaaatggataaaaggaaccccaaaaaaataccgctccacttccctacgcaggtctgaacctgttcaagttatgagggtctaaaagtctcacttttatctcagcccttatgaaggacacccctagtggtcatacgattaatgatttatttgttatgccttctatattatcacgaattgcaatttggtcaagcttcaagaatttttctcagttccgacacgtagttgcgcgagcccgtgacgatgagacggtctcctgttttcagccgcgtgtctccgtgcggaacgatgctgtccacacctctgaatatccggacgaaaatcacatcgcccatcagcggaaattcccgcagaatgatgccgttatacgccggattttccagattgatctgatataacgaagactcctcattcgtcaggaggctcatcacgcccggcgcctcaattaatgcgcgcaagagtgtctttgtagacagaaggatagaaaaaatactgatgccctcttctttcagttttgtttcatgctcaaccgagccgacgcttgcgatgatacgctcagtccctttctctttcgctattaaggcgatttcggcgttcacatcttcatttcccgtcgccacgacaagaatatccgttttgaaaataccgtgcgactcaagcgtgccgggctcgtaatcagaaatcgtgtcaaccgaaaaaacggattccgcaagcgtttccccggcattttcctgatacacatggacgacccgtacttcatattcctcctcaggcaattccagcgtaaccggaagcgtcatttggttggcgccgataaatgtaatgcgctttttttcctgcggcgcgctttgccgtttgtataatttcttaaagccgatcggcgtgatgatgctggcaataaccgcaactaaagtcagcgcgccggacatattggcgctgataatgtggagcctttctccgatcgtagccgccgcgataacaagcgacagcgtggacgtcagcaaaaagcccgaagcaaacacggttcttttgtcataccatttctttaaataaaacaccggaaacattttgctgataaacagcgcaagcagaagcagcggaatcatcgttaatgttttcggatcttggaaaagcgtccaaatgtccaatttcaccccgaccatgacgaaaaagatcggaattaaaaacccgtagccgaatgaatccagctgttccaccatttctttattcggagacagaagcgataccagaacgcctgccaaaaacgcgccgagaatattttccgccccgagagattccgataaagcgacaagcacgataatcagtgtgaaaatggctctcgtgccgatctgcacggtgcctttggacatcgactgcacaaatgaacggtgtttaaagatcctgccgaagaaatacagcacgacccccgcggcaaagagaatcaacagaagccacatatttccgctgtcttctccgtaaagagaagagaaaaaagcgagcagaatcatcgtagccaagtccgcgataacggcgacaagcaggatgatctggccgatattggagttcatgatccgttcttcctttaaagtcgggaccaccacaccgagtgatatcgtcgaaataataagcgtcattaaaaatgcgttttgtataaaaccggctaatacaaaggcataggacagcagcaatgataaaataaagatgccgaaaaagataatcagtgcggcagaaaacgtgttgggcgcctccttgccgttcggaaggaattgttttttcttccctttctcaaatgaagaaaaatcaatttccaagccgcttaaaaacattaaaaagataaagccgagaacagacagcgtctccagccacgtgtctccctgaacgacaagattcaggccgctttttccgataataagccccatgatgatctccgcgacgacgacggggatgctgagcttaaaccgatgtaaaaggagcggcgtcaaaaaagcgacgatcagaacgacgactaaagatgcgactgatgtgtgttccattcgtaaatacctccttaaaacaagggttataaaagcccgcttaagcgggcgaaaccttacttttttttaaaaacataacgcatattctaacaaggctgaacgcgaaaaaaaagtgataaggctttatttctttaattctttttttaatttgtgcaaaaacagcgtaattaggtataggaattagccccataataaataaaaaaccgttaataaggaggctgacacgaatggcttatgacatcatcagcgatatacacggatgttatgacgaaatgatcgcgttaatgcaaaagctcggatatgaagtcaaagacggaacgcccgttcattctgaaggcaggacgcttgtctttgcgggggatttaacggacagaggcccaaaatccgtagaagtgatgcgttttgtggcaaaagcatatgaaaaaggagccgtccgttatgtcccgggaaatcattgcaacaaactgtatcgttacttaaaaggaaaccccgtaaaagtgatgcacggactggaaacgacggcagccgaactgaaagagctgtctcccgccgacagaacggaagtctccagacaatttatccgattatatgagtcagcaccgctttatgacattttacataatggcgatctcattgtcgcccacgccggcataaaagctgacgatatcggtaaatactcgcgtaaggtaaaagaatttgttctgtacggcgatatcacgggtgaaacgtatcccgacggcaggcccgtcagaagagactgggccgccgcttatgaaggcaaggcatggattgtttacggccataccccggtaaaacgcccccggatcgtcaaccgtacaatcaacattgatacaggatgcgtcttcggcaatcaactgacaggctttcgctttccggagcatgaaaccgtctctgtggaaagctcaatgccctatgatgcttcacgatttcgcgaggatcacggcagggaggcatgaaaaaaagcccgaaaccggtaaacggttcgggctttacatatgttcaattaatgttttcatatcgtcaggcaccggagcgtgaaaaacgagcgtttctccggtcatggggtgtacgaatgaaagccgctcactgtgaagagcctggcgcgcaattccctcattttttccgccgtacagtgtatcaccgactaaaggatggccgaggtagctcatgtgcacccggatttgatgcgtccgccccgtttccagccgcagggctgcaagcgtaaacgcatgtcccgctttttccgtttgaaaatgcgtcaccgctcgttgtccctccggcgttaccatccgctcaataatactgtcgtgttttcttccgatgggcgcgtccaccgttccttccttctgcagcatgatcccgtgtacgacagcgagataccgcctgctgacaagccccttcttctgcgctgccgacaaaagagaatgggaaagccgatgtttggcgatgagcatcgcccccgatgtatccctgtcaaggcgggtgacaagatgaaccgttgattgcacgccgctttttcggtagtggctgatcactccgttagcgatgctttccgacgggtgttctcttgatggaattgaggagacatacggctgtttattgaccacaagcacatggtcatcttcataaagaatatcaagcggaaccggctcaggcaaaagcgtttcactcacatgctccttcggaaattcaatcttaagcacatctccgtctgctaacacggtgcggacggttacatgctctccgttcacaagcaggtctcccccgccgaatttaatgtcagcgagaagccgctttgaaatgccgagctgcgccgtatattcttttaccgtcatcccggcttcccgggcagtcatgttcttttggataaaaaagttgtccaatccgtttcctctttctattcgccttttccgataaaggaatcctgcacccttttccaaaacggaaaaggacggaatcttgcaaatctgactttttcatttgccacacggcatagaatggacttgacatccttatgcagcaaggttaaatgatcaattgtgacttgaaagtcgacgtcgtttctcggtttgatgacacagttatgatgatcgggaagcaaaagcggcgagccgacagtcctgaacactctgttgttgatggatgccatttccgcaagctgaatcgccctgatggaagggtggatgattgcgccgcctaacgccttattataagccgtgcttccggaaggcgtggacagacataaaccgtctcccctgaacgtttcaaacagctggcctttaatttccacgtcagcgacgagactgccttctatgcttttgatcgtacattcgttcaaagccagataccgctcctcacgctcttcatcatgataagtgacaatcacctcaagaaggggatactccacggtatgatacggcgttttggcaatggccagaacgagcttttctatctcctgcggaacccaatcggcataaaaacccaaatgccccgtgtgaactccgacaaacgccgttttatcgagacggtcgctgtacctgtgaaatgcgtaaagaagcgttccgtcaccgccgacggaaataacgatttccggctctttttcatccaaggtcatatcaaaatcgagtaaatacgcctgtattttgcttttcagtgtatctgaaacctcgtctccttttgaagaaacggcaaatttcatgccattcccctcctttcctactggtggtctcccgcttttttctttcgcgagaacgcggcttgagcttcctggatttctccgcggatttctgacatttcttcatcgagccgtgatgcggcttctgaggcccgctgcagcctcagctttactttttcgggaatgttcccgctgtatttgtaattcagtgaatgctcaatggttgcccaaaagttcatggcaagcgtccgaatctgtatttccacaagaacgtgcttttctccggacgttgtttgtaaaggatataaaacgacaaggtggtaagaccgatatccgctttccttatgctctgctatgtaatcccgcttatcgacaacggtaaaatcttttctggcaaacagcatatttttgacgatctggatatcatcgacaaattggcacataatacgcagccccgcgatatcctgcatcgtttcaatctgatgaagcggtatgctttttcgtctcgctttttcaagtatgctcgccaccggcttcacgcggcctgtcacaaactcaatcggtgagtggtcatcttcatactcataaagggttctgacgcctttcagcttcacctttaattcttcaacagcctggcggtatggcgctagaaattgctcccattgtttgtcatccatcgtacatcccccaattccgaacctgttctaaagaaatacgcttttcactttctcttccatatctccgtagtttgcattatctttaatattttcaagaagataatcgagttcttcatgcagccctgaaagttcaaccatttttccgccggcctcaaggaccgccggttttctttggtctaaggcttttttcagatccggccagatatgttcttttataatgacatattcaaaagagtcagctgattcaagtatgtatacaaaagcaaagtgatcggaatcaacaagcatttgacctgaggctttgcgttccgctccgcttaagtcctctccgcacttcaagcggagcgcgtcttctgttaatgatgcattttggatttcaattctcttttgcataatgttctccttttttaacaaagtacagcatttattttatcatatcaaggtcgatattgataaacgtaacctctaaagagataatgggaattatacaatttttcgtcctgaaaggaagactgtcatgacccaagaaatagaaattgaattcaaaaacctgctgacaaaatcagaatttctgaagctgagtgaagcactctgcatgaaagaacatgattttaaacagcaggtcaatcattatttcgacacgaaagatttttccctgaaacaaaaaaaatcagcactccgcatccgagaaaaagacggcgcgtttgtcctgactttaaaagagcctgccgcggtcggtctgctggaaacccaccaagagctttcggcacctgatcttgacgtattcaagatcccggaaggctccgtcaaacgtcagctggaaggtctcggaatcaactcagaacacatttgctatttcgggacgctgtcgaccgcacgcgcggaaaaagaatcagaaaaaggcttaatcattttagatcacagccgatatttagagaaagaagactttgaattggaattcgaagctgctgactgggatgaaggaaaacgggcgtttgaacaattgctcaagcaattcggcatcccagagcggatcacgaaaaataaaatccagcgtttttatgaacagaaacaaaaaaaggtggaatgacacagtgaatataacgaattgggcggcccttctccagttgcaatcagtggcgctgcaatcaatctctcatacaagcacggcttcaggcggacaatcttcagaaagcccgcttgccaatttcagcgcgcttctcagccagtatacggacacagccgtccggcagcagccggaatcaggaattttaaacggtgtgcggaccgctcacgcttcatattcaccgagaattcccgtttcatccggctccgcggctgcttcacagaccgcttccccgggcataaagtctccggatgcggcatctgatatcagcaccggaaacttttcaatagacagcgccattcagaaagcggccgaaaaatacggagtggacgaaaagctgatccgcgcggttattaaacaggaatcaggctttaatccgaaagcggtcagcggtgcgggggcaatgggactgatgcagctcatgccttccacggcagaatcactcggggtgtcaaacccgcttgatcccgtccagaacgctgagggcggcacaaagtacttaaagcagatgctcacgaaatacgacggaaatgtatctctggcgttagccgcctacaacgcaggccccggcaacgtagatcggtacggaggcattccgccgtttaaggaaacacagcaatatgttaaaaacataaccaaacagtattacgcgtaaaccagagaggcttccttcgccctctggtttttttgcggagtgaaatcttacacatgaatgaaggcgatgtgatatgatatgaaatacaagcgcctgacagaaaggcactttgtttgtagaaataaaatgttattgctaaaatatacagtaactgaagatagtaaaactgaaagataaattcgcaatgggaattatgattcctattagccatataaaggagtagtcaacatgggacaatcgtttaaagcaccatatgaagcgattggagaggaacttctatcgcaacttgttgatactttttatgagcgtgtctcgtctcatcccttgctgaagccgatatttccaagtgatttgactgaaacggccagaaaacaaaagcaatttttaacccagtatttgggcggacctcctctttatactgaagagcacggacaccccatgctcagggcaaggcatctcccctttccgattacggacgagagggctgatgcgtggctaagctgtatgaacaaagcgatggatgatgtcgggctggagggcgatattcgtgaatttctgtacgggcgtctggaactaacggccaggcatatggtaaaccagtcagaagcggaggatcgatcatattgacgaattatcagcatgagcaatacttcgcccattgccacggacatccaaaaaaaccgctcgaaatttacatgtttgtcgaccctttatctcctgaatgctggtcgctggagcccgccataaaaaaattaaaaatcaaatacggacgtttttttacgctgcggatcattgtttccgcgagcattacatcgctgaataagcaaaagcggaaaaaacaccttcttgccgaagcttgggaaaaaattgcgaaccgttccgggatgccctgtgacggaagcctttggcttgagcaggatcagcctctttcatcgccctaccttgccgcactcgctttaaaagcggccgaactgcagggaagaaaagcgggcattctgtttctccgcagcatgcaggaaagcctgtttgtttccaagcagaatattacggatgaagacgttcttttagaaattgccgaaaagacgaaattggatgttgaagaattcaagcgtgacctccattcgcaaagcgcggtaaaagcgcttcagtgcgatatgaaaatcgcggcggaaatggacgtcaccgtcaacccgacattgacgttctttaacagcctgcatgatgatgaagggctgaaggttcccggcaactattcttatgacgtatacgaagagatcttattcgaaatgctcggggatgaaccgaagccttctgaaacgccgcctttggaatgtttcattgaatatttccggtttgtcgcatcgaaagaaatcgcactcgtttatgatttgagtctagaagaagttgaaaaagaaatgaaaaaactggcattcgccaaaaaggtcgccagagtggaagcaaagcacggtctgttttggaagtctctttccggcacccaggaggatgtcacctgttgtgatcattaaaaaaagctgattccttacggagccggctttttttgtgcaaataaagaaaccgcgccgggataagcgcggtttcatatgtcttaacgacaacaaaggggatgggagaaatttttcacggtcaaacaaaggggtaatgtttgtttgtgatcaatttcacatccttatcatatcaaatcttgtcgagttttgacaagccataagattaatgttcatatttttgtcacaaaacataactgactgcttgttttcatagaatatatcaatgaaaaacaaggagggaaatcaatgctccgcaccgtattgatcatcggaatgattgtgtttttcttctttttaaatctgctggccatgatgcacatgctgccgatttacattacatctcccctgctgtttctgtccatattgtttgccttgtaccggctgaatcacagaaaaacgtttaaagggttttagaaaaagcctgcgcaacttatgcacaggcttttttgaattacgaagggttcactttcgaaagaagctcttccatttcgttcagtttctcttcaaacattttgcaggccgcctcgatcggttcaggcgatgtcatatcgactcccgcttttttcagtatgtcgatcggatattccgagcttcccgcttttaagaattcggtatagcgctccaccgcaggcttgccttcttttaagatctggctgctcagcgcttgggccgcactgtagcctgtcgcatattgatacacataataattgtaatagaaatgcggaattcttgaccattccagactgatttctttatcaatcaccatgttgtcaccgaaatactttttattcagatcataataaagttcgttcagcagttcaggcgtcagcggctcgccttcctgcgctttcgtatgaatcagatgctcaaattcagcgaacatcgtctgtctgaacactgtgcctctgaatccttcaagcatgtggttgagcaggtacagacgctgtttttcatcctttaagctgttcagcatatattcaccgagcagcgcttcattagtcgttgaagcgacttcagcgacaaaaatgctgtagttaccgtacggatacggctgatattttctcgtatagtagctgtgcacggaatggccgaactcgtgaacgagcgtaaacagattattgacattatcatgccagttcatcaagatgtacggattcgtgccgtatgtaccggacgaataagcaccgctgcgttttcctttgttttcgtatacatcgacccagcggttttcaagtccttcttttaaaatagacgcgtattcctcgcccagcggagcaagtcctttgagcatataatctttcgcttcctcatatgtgaccttcattcccgaatcttttacaagcggtgtgtaaaggtcataaatatggacttcatcaaggccgagaacctttttccgcaggtcaatgtaacggtgtaataacggaagatgtttattgatcgttttaataaggttatcgtaaacttcttcagggatgctgttattggataaagccgcttcccgtgccgatttatactttttcacacgggcgtaaaaattatcttttttcacagtgccgctgagtgtagtcgccatcgtgtttttatactgtccgtatgttttatatacggcttcaaatgcgtttttacggacttcacgattgctgctttccaggaaattaataaagttgccgtgtgtgatttgagtttccttgccgttttcatctttaatcgacggaaacgtaatatcggcgttatttaaaacgctgaatgtattggaaggcgacgacagcgcttctgaggcttccgcaagcagggcctcttcttgttcgctcagcacgtgcggacgctgttttgtaatttcttcaattgcatgggagtaaagcttaagctcctctttttccagaataaactggtgcagcttgtcctcctgaatcgccagaatttccggttcaatgtaagcagtcgcgctggcagcctgagaatacaggcttgcggctttatcgttcagcccttggtagaaagaatttcccgtatcctggtctgagcgcatatgcgcgtatgcataaagtttcccaaggcggttcgtcacttcatcctgtgccgtaagcgcagcgtataaattatcagccgaatgagcaagcgtgcctttaaaagaagataaattcggaattaattctttaactgcttgaaattctttattccaggcctcatcactaggaaaaatatcctctagtctccatgtatgctctgcctttacatcacttctgtcaggcagctgtgctgctttattttcctcagtcatggtgatccccctcgttttctttacttcaagccaattgaaaaaacgattgtttctccaaaaacttgtgttgtgattatcttccggcttttcactgccttttgtcaaatcatatgcggcatataagaccgagcataccaataatacagtgaaaaaacgaaaacaaaatgcttgtacgcccctcacattcgccaccaccttgacgttagggtgaacgaaatgaagcattctcattccccaaaaaagagcagatcccgccggcgcagctcttctgccgtttgagggagcttccgttgagatgagggcatatatacttcattctcaatttcccttaaaaaatcctgcaagcataagaaatcagcatattgttttaccgccattctgataaggctatcttgtgaaccataccgcatccggatctccttatgcctgattttttgccgtaaatcatgaaccatgccggataatcggagcggcgcgccttttttagaaagttccgcaagccgtaagtataaatggccctgccacacaaaaacaggacttgcaaacacaaagcccgctgaaacgggaataaacacttcagatgggagaaatggaaatgcaacctgatgtctttcgtaaaaaagacgccggataagaccggcatcttcagataaaaaccgcccgcttttgttgcggaagccggctacggcacgtccccacgagggaagtctgacgctgtgccgcccttccggatgacaaatgtctttcagatttgctttgtgaagagggattgcggttaagccggcataagaatagccggtgtaaaacggagtgatggaatgcagcctgtaaaaggagcgggcgtcggggcagtaaaacagtaaggaggaaaatgaattgacttcaaagaactgccagtgaaaagcagaaagccggaaaaattgcgcggccatccgttttaaccgttttgccccgatgatccagaccggccggtacccggcgtttttcaggcctgccgtccggctctttaaagagtccgccgaaaggttcgcacattgaaattcaaaagccagcctctcttctccgtcttctgccgtcaagtcaggccgctgtcccgcggaagtcagatacggttccaggctgacgctgcacccttgtgtctttagccagagaaaaagctgtctttttccttcaagatggtattcgctttcaggttcggattccccgggacacagcctgctttttttatgagcgaagtgcggcagtttctcccgtcccagtttgatatcaagctcacttttgcaaacggggcagaaccagcgtttctttctcagctccgccgctttttcctttgaatagcttccggccagctgaatgagccgtccgtcggcagtcacagcactgaacatgttgcatcttctcctttcctgaatcttgttgtattcagcaggaagaagatataatcctgtttgcggatgagagccgttatacggttttcagccgttcatcctgtcattcagaacaaaaaaaaccgatttctgctgagagaaatcggtttgttatgatgcaaagtgtttttttattgtatataacgcatgatcagcgatcaccaatttgccgtattcttcaagacggtgaatgctgactgatgattcgtgcgcgtactccaacaggatgcttagctgattttcaacctcttcatcagtttgctcataaaaatctgcatataaataatatcggtcttcaaacgaatacagggtcgttttaattccgttaagattcaattttgatagcgagatgagatcctcaaaatcatcgaaccgcaaagtgaactgaagcttttgctccttatcttcccggctctcggcctgctcttctttctggaaatcatcaagtaaagcatcgagattttcatctgccgactcttgttttttatcttccgggatcggcagttcgagtttttgtccgtccttggaaagctgggcttttgttacgattatttccagtcctttgtccaatgcctgaacctgaatccaaagaggaccctcgacagcgaattcctcttcatcatgcacttcatccatgacttcccagaacagttcttcactgcgctcgcgattgtaccagatttcttctctgtcaaaaccgcgatcttcaatatcaccataagacatataaaattttacagtatgctcattaattctttctatttccattttgccaaccttcccttctttataagatgttgaagggacatctaagctcccgatgaatagtactttactacactttacccattccgtccacatcttaaccttatagaagacagcgcaaattctttatatttctattttatgataaaacagttataaaagaaataaaaaagcattttcacaccgaaaaacaggctttctcccggttcccatcataaatagcgcactgcttcatatattagctgtacaagcaatcgatctataagcgaggtgttaccatgccgcacgattacctgctgtcccttctgcttattatcgggattgaccttattctcggcggtgacaatgccgtcgtcatcgcgatggccagccggaatctggcccataaacaaagacagcaagcgatcatcttcggaacatttatcgcagtcgtcttgagaatcgttctgacgagcgctgcggtctatttattgaatgttccttttttgcaatgcgcaggcggggtatttttattgtatctcggctatcagcttctgattgagaagaaagatgcgcagcatgtgaaaagcagttcttctctttggaaagccatccgcacaatcgttctggctgatatctttatgtcgcttgacaatgtcatcgcagtagccggcgcttctcacggtgagctgacacttgtagtgatcggtctcttcatctcggtgccgattatcatttggggcagcaagctcgttcatgccgccatggaaaaaatgcctttattgatgtatgccgggagcggtcttctcgcatttaccggcggtgaaatgattgccagagacagcaagctgtcatttttcatggctgaacacggcattatacaaatgatgctgccgattttgaccgtcgtatttgttatcctcgccagtatgatttaccagcagactgaaaaataaaaaaagcccaaaccgcgatggttttgggctttttccatgcttatcgtaagcttatatcagttggcaagacgctgtgcttctcttaattggaaagaacgcacttttcttggcaggaatcgtctgatttcatcttcgttatagccgacttgcagacgtttttcatcaatgatgatcggacggcggagcagtcccggatgctcattgatcaaagtatataagtattgaagcggcatagattcaacatttacgttcagtttctggaatactttagaacgggtagagataatttcatccgtaccgtcttcagtcatacgcagaatctgcttgatctcatcaattgataacggctcggagaaaatgtttctttctacaaaaggaatctcgtgctcttcaagccaagctcttgcttttctgcatgacgtacagctaggtgatgtgtataatgtaaccattaatcttcactcctctaattagtaggatgaacatgtttgtattctcaaattgaaataactttaaaaaaggaatctttataggtattatactataaaaaagtaagtgtgaacagtctcctgagaaaaaaatgtgtcaatccggcaaatttacggctggcggatgtttccccattctcaattagctcagctgatcgaaaatgttttttcgttttttctcatcaatgactttgagaacttcatccgttttttcgtatgattctccgtaccatttttcatctttataagtgtgaatgttttcatatgtctgtttcattgcttcaaacatttcttcttctgattccgtcttaggtgaccagtacagaatctccattttgttcacttcattcgtagccaatgaccggcgccgatacccgattgactgcgcgtgcttgaaatgctctctttgataaaaacgcaagcgtttctgtgtatccgtgtcatcttcgtcaacaggctccacctcaagcagaatcggcttgtttttctttttcagcctgccgatcagcttgcttccgaggccttgtcctctggatttctttgacacaaacaggtaatcaataaagatgaaagagtcaaattccgcatacatcagcacgtggtactgcccctcttctttatgataaacatcgctttgctcctttaacagagcctccatatgcgcttttgatttcatttcttcaatcggaaaatattcactcagcttttcgtaccagttcattcatttgctccttatgggttcgttgtcttcacacttttagatataccccatttccgattgtttaaacaatcttacatctattaagacgtgtgatcctttaacatggtttcaatttttttaaaatggtgtgtaatcgacgtttttggtataacggtttgccgcgtcccataataaaaattcgtcaattccttcatcatgcagcgctttaacctggtcttccacctggcgtttcccgtacttttgataatttccgctgccgagatatgatgccgtgaagtcctgaagccacggacgcgatacaggcgggtgtttcagcttagacagttttttattttccaccttcgcgtattctttgacgactttgtaaggctcaagatccggtttatcaatgccgaaatagcttgtccaatggctcggataaatcatggatgaaatgacatcgacctgttctgaaattttgctgaaattctggccgatcccaggcgcttccggcagcgtggctgaatagccgaaaatatcaaccgacacatccgcaccgtacggcttgagttttttcttcgcataaccgacaaaatcggtgacggcatgaacgcgtttttgcacattgctgtctgctgtttttccgtaatcgccgtgaccgtatgtcagttcgtcatcacgtttttcaaatccttcaggaaaacggacataatcaaactgaatttcttgaaaacccatctttacggcttgttttgcaatctttacattgtaatcccatacctctttcataaacggattgacgaacgattcgccgcggccgtttttccagacacttccgtttttttctttaaaggaccactccggctttttgttcgcgagttcgctgtctttaaatacgacaatacgcgcaatcggatagatctttttttcctccagctttttcatcatcttttttgggtctttgatgtaaggcttggcgatttcggcatactcagaatggccgtccggcttaaaggtgaggtttccgttgtcatccttgacatcaatcaccattgtattgagttccgttttgtccacaaagtctgtcagctccccgaatttgcttcctcccgctgaatgccctgtgacgtaaatgccccgcaccttatcaggatgtgaaaaatgcagccctgacggataagcgaaccgtgcatttgatttcggcagttctttttcggccagcgctatttttacaagcggctgctcctctttcacagcggcgtgggccggataagcggctgcactgataaacagtcccgcacaaatggcgcacaaaatggttttcatactgatctcccccttttttccattatagaaaaaagggagcaggcttaataaacttgaatgtgcgcaaaaaaatcctccaagactgagtcttggaggaagataggtttataggtaggttttaaattcagcttcagtgcacatgacaaaatgtcccggtttcacttctctgaattccatcttttctccgtcttgcagctgatgaactgccggatcgtatttctttcgcgtgcgatttctttcatagtccggatcagggagcgggatagcggacagcaatgatttcgtgtatgggtgaagcgggttttcgtaaagctcatccgccggcgcaagctccaccaattttccgaaatacatgacgccgatgcggtcgctgatgtatttgaccattgataaatcatgggcgataaacaggtaagtgagccctttttctttctgcaattctttcattaaattgacgacttgcgcctgaatggagacatcaagcgccgaaatcggttcgtccgcgatgataaactccggatcaaccgccagcgctctggcgattccgatacgctgtctctgtccgcccgaaaattcatgcgggtagcggttggcgtgctctttatttaaaccgaccgtttccagcagttcgtgaacccgctgcatccgctcttttttcgtttttgccaggcggtgaatatctattccctcggcaataatgtcggcgactgtcattctcggatttaaagatgcgtacggatcctggaaaatcatctgcattttccggttaaactccagcagcttcttgcgggattttttcccgtggacattttccccgttaaagagaacttccccgccggttgcctcatacagccggataatgctgcggcccgtcgttgatttaccgcagcctgattctccgacaaggccgagcgtttcgcctttataaatatcaaatgacaaatcatctacggcttttaccgttcctttttgcgtgaaaaaatgctgttttaagtgtttgatttcgagaagcttctcagtcatttttttcaccttccttcattaaaacaggatgctgatacgtattcggaagctgacggattttagccttcaccgcttcaggcggctcgaccttaggcgcatcaggatgcagaagccacgatttcacgaaatgcgtatctgacactttatacatcggcggttcctgttcaaagtcgattttcatcgcatatgagctgcggagcgcaaatgcatcccctttcggaggattcgtcagatcaggcggcgtgcccgggatggccgtcagtttttcctgatcggtgctgtccaggctaggcattgaggcaagcagtccccacgtatacggatggcgcggatcataaaagatttcatccaccgtgcccgattcgacgacctgacccgcgtacatgacggcgacccggtcggcgacattggcgacaacgccgagatcatgcgtgataaaaatgatagacgtatcaattttcttttgcagatctttcatcagctcaaggatctgtgcctgaatcgtcacatcaagcgccgttgtcggttcatcggcaattaacagtttcggatttgccgcaagcgccatcgcgatgacgacacgctgtctcatcccgcctgaaaattcatgagggaattggccgatccgtttttcgggcatcggaattccgacgagatcaagcagctctatggcgcgctttttcgccgcttcacttgagattttttcatgtttgaaaagcacttccgtaatttgtttgccgactctcatcgtcgggttcagagaggtcatcggatcttggaaaatcattccgatgtcctttcctctgatagcctgcatttctttttcagacatcggcacgatatcgcgtccgtcaaaaagaatctgtcctcttttaaagtagcccggcggcatcgggatcagtttcataatcgcttgggaggtcacactttttccggaacccgactcccccacgatcgccagcgtctctcctttattcaaatggaaattcacgccgcggattgcctgtacctctccgccgtatgttttaaatgaaatggctaagtcttttacttctagcaagcgtgtcactcatatcactccttatttgcgtaacttaggatccagcgcgtctcttaacccgtcgccgacaacgttaaagccgaacatcgccaggcagataaagccggcagggaagaacagacgccaagggtaataggttaatgcaggcaatccgtctgaggccatcgttccccagctcgcaagcggcgcaggtacgccgaggcccaaataacttaaaaacgcttctgtaaaaatcgccgtcggaaccgtcagtgtcatcgttacgaggatagatcccatcgcgttcgggacgatatgcttaaacaatagccggccggttttggcgccgagtgtctgtgaagcaagcacatactcctgattctttaattgcagcacctgtccgcggacgattctcgccatattgatccagcccgtgatcgtcatggcgacgataatggtcagcaatcctttcggcaggacaaccatcagcaaaataaccattaataatgaaggaacagcccacagaatgtcggcgatgcgcatcatcacttcatctgtgcgtccgccgcggaatccggaaatgctgccccagattacgccgattaataaatcaagcacggcagctgcgacaccgataaatatggaaatccgcgcgcctacccatgtccggacgaatatatcccttccaaggtcatccgtgccgaaccaatgatctttcgacggcgctttatccgcatttaatagattggtagtggcataatcataccttgaaaagacaggcgcaaaaatcgccatcagaataataagtacgatcattacgaacccgaccatcgcaagcttattgctgcggaagcggagcatggcgtctttccagagggaaaggctttttttatttattttttcggcatcgccggcattagctgaagctggttcaaacatatttttaggaatgttctgcatggtctaggctcctttctttgctttagaaagcttgattctcggatcgattaatccgtacagcacgtcaacaattaatacgcataaaagcaggagcacgctgaagaacacggtaactcccataatgaccgtataatcacggtttgtaatgctgtttacaaaatgcgcgcctaaaccgggaattccgaaaatggattcaatgatgaaacttccagttaaaatggatgccgccatcggccccatatatgtcacgaccggcaaaagcgcgtttcgcagcgcatggcgcacggtgactgacggacgggaaagtcctttagcttttgcagtccgtatgtaatcgctgtttaacacttcaatcatgcttgaacgggagagtctggcaatgaacgccatcggcatggaagcgagcgcaatagagggcagaaaggtgtatgcccaggattcccaccctgcgaccgggaacagttctaatttaattgagaaaatatattgcaaaatcgtcgccaatataaagctcggaactgagatcccaaagatcgttaaaatcgcaatggtataatcctgccacttattatggtacagggcagcaagtaccccgaaaagcacaccgaacgctaaagcgaggagaatagcttctgcaccgagagtgaatgagacggggaagcctgaattgattaaatcattaacactttggcctttatatttaaaagaaggtccgaagtcccacatcgccacagattttaagtagctggcatattgaacgaaaagaggcttgtccaggccatagtgttcgtttaagtttgcctcaatttcaggcggcagctttctttcgccggaaaatggtccgcccggcgctgcctgcattaagaagaatgtggcggtcacaatcacaaacaatgtgatgatcatgtaaatgaaacgtttaccgatatatttcagcaaggtgaacacctccatgttttttacaattttatacttaatcagtaagaaaggtatatggggacatcctccccatatacctggtcttttgttttcagaaccgtcttttattcaaaagaagcgtttctgaagtaaacttcgcctgttcctgtcaagatcacatttttgaggtttttatcctgcacccaaggatccgtatagaaataaactggcgcgaccggcattgcgtcaataaagatcttttctgcttttttcagctcttcgatacgtttatccggatccgtttcaagctgagattggttcagcagctttttaaactcaggatcttcccatccggtatcattgtttccgccttctttatcacggaacaattcaaggaagttgatcggatcgttgaaatcgccgagccagcccatacgcgcgatttggtagttctggctgtgcagcttgtcgatgtaaacattccattcggagttatcaagctcaactttgacgcccaagttctttttccacatttcctgtacggcctgcgcgattttcgcatgcgcgtcatccgtattgtaggacagtttgatcgccggaaggtcagaggcattcttgacgcctaattccttcagtcctttatttaagaattctttcgctgatttgacgtcattgtctttgaaataaccttttgtgttatccttgaatcccttcattgacggcggcaccgcagccatggccgggatttgttcgccctgcgttacatttttcacgatggacgagcggtcgatcgcataagcaagggctttacggatgttgacattgttcagcggtttctcttctgtgttgaatttgtaccaatacacgcctgcgatcggttcaacgtgaagagatccgtcttttttcaatgtcggcagagattcagtcggaagctggccgagcggcattcctgcccagtcaagctcaccggcctggaattttttcagttcggtgttgttattgttaatcatcaccatgttgattttcttcaatttcacagcgtctttatcccaatattgatcgttcttttcgagcgtgatggaaccgctgtgtttccaggccgtcattttgaacgggccgtttgacacataattctcgcccgcgtttgtgttccagtttttatgtttttccgcaattttcttgttgaccggcatatacgtatagaatgaagttaattgcgtgaaataaggtgtcgggttattcagttcaacctttaatgttttgtcatttacggcttttacgcctacatcatcaatcttgccttttcctgtattggcagcttcagcgcctttgatgtagtagagctgataagcgtattgtgattcgttgttcgggtcaagcgcccatttccacgcatattcaaaatcctgcgccgtcacagggtcgccgttagaccatttcgcaccgtcacgaatcgtaaatgtataggtctttccgtctttgcttgtttcaattttagatgccattccttcttcaggctcacctttggagtttacgcgtgtcaatccttcaaaagtctggcggattacgcctcctgaaacggaatcattcgctaaacccggatgcagtgagaacggctcggttttaatattgatattaagtgaagtctgtcctttggtgtcttttttaccgccgcctgatccgccgctgaatccgccgcacgcacttaatacaagcgaaaagataagcatcaaacctacaatagaccaacgctttttcatgcactaaccccctaatcaaatttttcagcctttactactaaatactcagaaatatcagacaaaataacttaatatttttctaaactttaattgtgttccgtcttttctgattattttatgtaaagaagctgtaacaatagagtgaacaagttcattataatgaaatgaataatttattgcaatactattttctcaatttaaaatatttaaatttggtcagtttttctgtcaaaaaggtgatacacttctatagtttaaagcatgacctaactaaatttttttattgcaatttccagttcatattgctttttacatataatattcgttatacgaaatgttgatatacgttatcatttaagcattttcagttctttttgaggattttcatcccttaagcaaactggaaataagcttgtattcctctgatgacatttggctataattgatttataatagatcaatcaaatacatttgttgtgattgcgatgatgaagaatagtacacattttcatccgtttgaagagagtctgcggtgctgggagcaggtaacgggcaatgtggaatggacttctgagcagctgaccgaacgttagtaggcccagccggagcagcctccgttaccaacgtctcgagcgattccattgtaatggaataatcagggtggcaccacggttcattcgtcccttttttctacgggaagaatgggctttttttattatgttttaagaaatgaggtaagaactatgaagaaaacgattttttctggcattcagccgagcggttccgttaccctcggcaactacatcggcgcaatgaagcaatttgtcgatttgcagcatgactacaacggctacttctgcattgtcgatcagcatgcgattacggttccgcaggatcggcttgaactgcggaagaacatccgcaatctcgcggctctttacctggccgttggacttgatcccgagaaagcgaccctctttatccagtcggaggttcccgctcatgcccaggcggggtggatgctccaatgcgtcgcatatatcggcgagcttgagcggatgacgcaatttaaagataagtcaaagggcaaagaagccgtcgtgtcaggactgttaacctatccgccgctgatggccggcgatattttactgtacggaacggatcttgttccggtcggagaagatcaaaaacagcatcttgaactgacccgcaacctggcggaacgctttaataaaaaatacaatgacatcttcacgattcctgaggtgaaaattcctgaatcaggcgcgcgcatcatgtcactggctgatccgctcaaaaaaatgagcaaatcagatccgaaccaaaaggcatacatcacgctgcttgatgagccgaagcagctcgagaagaaaatcaagagcgccgtgactgattctgaaggcattgtaaagtatgataaagaaaacaaaccgggcgtttctaatcttttgacgatctattctattttaggaaacacatcaattgaagaattagaagctaaatatgaaggcaaagggtacggtgaattcaaaagcgatttagccgaagtcgttatcggcgcattgacaccgatccaagagcgctaccgtgaattaattgagagcgacgagcttgaccgcattctcgacgaaggagcggcgcgcgcaaacaaaacggccggcaaaatggtgaagaaaatggaaaacgccatgggtctcggacggaaaaaaagataaagaaaagaggcgggagaatccccgcctctttttttagttcacttttgattcctgctccatttcccaaagcttttcgaaaaacggctgccctttaatcaaattttcacagaacgcaagatgtttatctgaccagccttcaattgtttcattgtaaagcatgtcccagatctcttcaaagctcatccgtttgatctgctcatacatatgcggattccattccgtgtaccaatacacaatttccgcacggtttttcagccctttcagctggtcgagcgccataaacatcagctgcttgatctgccgctcttttctcgtcagccctctgacgtgctccggcgccaatgacaaaatgtgatattcctttgaagactccaattgcgccggctcaaattgaaacgattccggttctacatcctttaccatttcataaacaagctgctcctgtctcggaatcaggcggctttttctgaccggaatggtatacccgatcgtatccacggcaatgatgccgatcccgtctgtcacgacaaaacaatactccagctttgtccgctcatgattttttcgcacgtatgacttttggtggacttggtcaagcagctctttcggaagctctgataagtcgttttctatgtaatgaaataataccgacggcactctgagcagcggcgtctgatccaaaagctcaaccgtgtcttccttccgccattcgtgaaaatggcatacattgtagccgttttcttccccttcaaaccaattgacccatacatcatgaagaaataacatattcgacccctcactttataaaaactgttgtccacagtataggcaagggatagataaattattccatttcgatatgagatttccgcaatacggaactggatttccgactgcattgcaacaaaaaaatctcccgttccgtccgggagatcatttcacatttttcggatcaagcgcatcacgcagcccgtctccgacaaagttaaagcacaatacggtaagaaggatcaacaaacccgggaataacggataccaccaagcctgaatcataagcgtaaagttctgtgcatcctgaagcatattgccccagcttgcgatcggcggctgaatcccgaaaccaagataacttaatgtagattccgccaaaataaccgttcccacctttaatgtggctgagacaataatcggtccgagcgcattcggtaatatatgagaaaagatgatgtgatgattttttgtaccgatcgtctttgcagctaatacaaactctctggaacgaagcgataaaaactcccctcggacaagacgtgccgttgttgtccagcctgtaagggagaaaattaaaattaatttatccattccgggctgaaaaatcgtaacaagtgtaataagcaaaaatatatcaggtatggataatacgatatcaacggttctcatgagaacggcatcgacaatccctttaaaatatccggcaacggctccgacaactgtcccgattgtaatcgcgccgatcacagaagcgaatccgacaagcaaggagacgcgcgccccgtacagaaccctcgtaaagatgtctcttccgaatttatcagttcccattagatgttttaagctcggcggcttcaaacgattgataagagattgactctccggggagtaaggagcgattaccgaagcgaataaggctgacaagatgatgatggttaatataacggctccgattacagctagtttattttgaaagaacttttcgaaaaaaatcttcgtcattgtttccggtttggattgaatattttcctttaattttacttcgctggggggtgtgccggtatttggctgtaacatttgacctctcacctctctttgttaatattcaatgcggggatcaaccagcgcatataagatgtccgcaattaaattccccaccacaaccaaaacagctgaaatgaccgtcatggccatgataaccggataatcccgcgaaaaggctgaatcaataaacaatttgccgagacccggccaagtaaaaatctgttctaccactaccgctcccccgataaatgatggtatcatcagaccaaaaatagtgatgacaggaagaagtccgtttctcaaaccgtgtttaaaaatcactttattatctcggaatcctttcgcacgcgccgttcgtatataatcctgttttaacacatcaagcatactggatcttgtgtatctcgttatccctgccatgtctgccgtggcgagcacaaaagcaggcagaatcaagtgatgcaatcggtcaaatatgttaaagtcagcatttaaagtgcttactccgccagtgggaaaccaccccagatttacagataaaaccatgattaaaatcaaaccgaaccaaaaattcggtatggcaagccctaaaaatgaagtaacagttatcccgtaatccaattttgaataaggacgtttcgctgacagaacaccaaatggaatagaaataagaagagcgacaagggttgagaaaagcattagcacaatcgtattcggtaaacgggataagataagttcagaaactggagtgcctttcttgacgatagaagtcccgaaatccccttgcagcatattccccagccatttcacatattgaacaggttccggatcattcaacccgtatttttcaatgaatttcgccctgtccgcttgactgattgtagggtccatcataagtgacatcggatctcccggcgctgctttcatgatggcaaacgacaaaattgtaatgcctaagagaatcggcaaggacattaatgttcgccgtaaaatatatgtaaccatattcttgtcccctttttaaataggataagagaggaaaggaacctccttccctctccagggcttttgctatttttgatccagccaccatttttcaatattgtacaagtcatttttaggatggaatacatagccttgtaaattattcggcatcgctctgtggtaattgtaatagaataagaagctgtacggctgatcttcagcaatcaatttgtatatctcttcatatttcttttggtattcttttctgtctgtaattgtcttcgcttcttcaagcagcttatcgactttcgggtttttataccagatattattcagcccgtttttcgattggcttgaatggaaaatagagaactgatccgggaacgttgcaagactccatccgagaagaagagcgtcataatcccaattaggggcacttgtctgttcgattaacgcactgaattcaacaattcgcggtttagcctcaattcccacttcttttagttgctgctgaacgacaacaactaaatcttcacgaattttattgccttgattcgttttaatttcaaacgagaatttttttccgtctttatcaaggtagccgtcaccgtcatggtcttcccatccggcttcttttagcagctgctttgctttcttcggattataatcaaatgtcggtactttagacttcggataattccatgacagcggactctcaggaacatctgctaccttaccgtctccgttcagcacttgatccaccattgcctgcctgtcaagagcgtaagtcaatgcctgacgcacttttttgtccttaaagatctcttttttctcattccagccgatatagctgtagtttaagccaagatcagatttgaccttcacatttccaaacgttttaaccgtatcaaaatctgtgcccggcacaacgaagaaatcaatatcccccgcttttaactgagccacggcagcgttagaatcaggtattgtttttactgtcactgtatcaaggtaaggtctgccgccaaagtaatcatcatttgcttccagtttgacgtactcgccctttttccactcaacaaacttaaacggaccggagccgattggatttttacggttaaattcattctctcccagatcagcaactggcaccttacccaatatatgtttaggcaaaatgccgtaactgtcgagaacgacattatagaaataggcatcttttttcttcattttaaactgaatttcatattttccttttttcgttacggatttaagggactcaaaacccgagccacgctcaccgttgtaatctttgttaagagggatgctgtaggtgaaaacaacatcatcggccgtcagctcttttccatcatggaatttaacgccttttttcagttttacatcatacgttaatcccccgtcagcttctgttactttttcagccagcgacggcttgacgtttaatttctcatcagtttccaataatgtactgtaaagcattccttcaatatcagaacttgcaacatcggtagaataaagtggattaaaaagtgtgggttccccggttgacccgacaaccaaatctccgcctttttgcggttttcctgccggtttggattcggtgcttgtggattttgagccggagcaggctgacaggaagatggcgagcgccataaaaacacttagcatcatcagtgcgcttttacgtaatttcatatcaattccccctttgtgatatatatgcagcaaactggttatgtaatccggcataccccctctcgatgcttgtcatttcaggcatataaatggcaggcgacgtaatggccgggagcggcttcttcaaatgccgggatttgttccttgcagatcggtttggccatcgggcaccgcgtgtggaacacgcagcctttcggcgggtttgccgggcttggcaattctcctttcaggatgattcgttcccgcttgacggcgtctttttttctcgtgacgggcactgaagacaaaagcgcttgcgtataagggtgaagcggattgccgtacagctcgtgtttatcggtcagctccatcatttttcccagatacatgacgccgactctgtcgctgatatggcggacaacactcaaatcatgagaaataaacaaataggtcaggttgaattcttcctgcagttcttccatcagattgatgacctgggcctgaatggagacatcgagtgcggaaacgggttcatccgcaataatcagctcgggattcaatgtcagagcccgcgcaatcccgatccgctggcgctgccccccggaaaattcgtgaggatagcggtttgcaaagctcggatgaaggccgactttcgccagcagctcctccactcgctcgttccgctcgctcatgctgtacatatggtgagtctggaacggttctttaataatagaacgcagcgttttcctcgggttaagggatgcgaagggatcttggaagaccatctggatgtttttgcggacgctttttctcagcttttcttcagataagcctgagatatcctgacccttaaaaagaattcggccgtctgtcggcttgtataaacggatcatcgtccttcccgccgttgatttgccgcatcctgattcaccgacgatgccgagcgtctccccgcgcttcagtgaaaaagaaacgccgtcaacagcctttatatcaccgactttcctttgaaaaaaaccggagcggatcgggaaatatttttttacgtctttcagctctaaaattgtttcttggcctgcagctgtcattttgattgggcaccctcttcctcatataaaaaacatcttacagaacggccgctttcatgcgttatcagctccggctgccctgttttgcatttgtccatcgcttttgaacacctcggggcgaatcggcagccttccggaagattatccggtgtcgggacactgcctttgatcgcttttaatgtatcaatctctccatctatcaccggtatggagtttaacagcccttcggtatacggatggagagggtttaaaaataagtcctccacactcgcgctctctacgacttgtccgcagtacatcacgatcaccctgtcggcggcttcggaaaccacacctaaatcgtgagtgatcagcagaatggaagtatcgaattttttgcagaggtctttcatcagctccaatacttgggcttgtatcgtcacatcaagcgccgtcgtcggctcatcagcgatcagaagcttcggattgcagctgagcgcgatggcgatcatcaccctctgtctcatccctccggaaagacggtgcggatattctttcatcacttgttccgctctggagaatccgacgagttccagaagctcaacggcttttttagccgcttctcttttattcatttttttatggtattcaagcacttcggtaatttgttcgccgatggtcagcaccggattcagggaagtcatgggctcctgaaagatcatagagacgtcatttccgcggattttgcaatattcgttttcggtgaaggaggccaggtccctgccttcaagcttaatcgagccgtccataatttttccgcccgagccttggacaagtcccataatagaaagcgaggtgatgcttttgcccgagccggattctcctacaagagcgacggtttcgcctttgttaatgtgaaaatcaaccccgtcgactgcggggatcggctgtttctttctgaaaaaataggtctttaaattattcacttctaatagtgtgctcatgatacgcccctttctcattccgctgaagcagagggaaacatacgtttcgctatcacaaaatatagaatagtcgaaaaattttatagttgtatattattacatcattattacaaaagcaagaattttttaggataaatgtaatatccttaaataatttccattcttttaatctattaatgcgttgcctccagaaaggtttttgaagggatggccaatgcttcttttactgttttttgatggtcggttaaatatttttttactatattgaatccgacagcatagccgagcattgaggggaagtatccttttccgtataacagctgggaaaacattctgctgtctctcgttaagcggaggttcggcttgactcttttttcaaacagaaaatcaagctgctcaggcgtatagtaggacgtccattccgccgtaagacttgagccgaaccgctcatatacagcatattctgccagcccctccatcatgattgtatcaagaaatgtctcatctttttcgtcctttgtcacatgttctaaccggcagacgtgattatattcatgtgtcataagggcggatacagctgaattggaactatccaacgatagaaagaggaacattttgtcccgaaaggccagaccggattttgatccgaattcctgacggattttccggtttcgttcatcgacgggcaaaactacgatcggcacgtccggcccgttccacttctcctttaaataggcttcctccttttgaatatgactgtagcatcctttttctttcagccgtttactggtcctgacgccgtccttcaaatggcggaacatgccgtggttttgcagcatcccgagtatcggcttccactctttcttatcggcccctgaaaaaagcggcaaaagatgcggggccagatcatttacggatgccgccttttccatccattgatatgtctgcttgacgctcataccggttcgcctcctcttgttgttatcatatgcacgcacaaaaaaaccggccacctttttcaggcagccggtcaaaactgtattattgatattttttaaagatcaaagtggcattatgtccgccgaagccgagcgagttgctgagaacgacgttgacatcctgctcgcgcgctttgtccggtacataatctaaatcacactcttcatcaggtgtttcgatgttaatcgtcggcgggataatgccgtctttaatggccatgacggagaagattgcttcaattcctccggcagcgcctaacaaatgacccgtcattgattttgtcgaactgacggcaagcttgtacgcatgatcaccgaaaacggtcttaatggcttttgtctcgtatttatcattgtagtacgtgcttgtgccgtgagcgttgatgtaatcaatttcttcaggcttgatgcccgcatctttgattgcttcctgcatcgctctggcaccgccttccccgtcttgggcaggcgcggtaatgtggtaggcgtcacccgttgagccgtagccgacaatttccccgtagattttcgcaccgcgggcaagggcatgctcaagctcttcaagcacgatgatccccgcgccttctcccatgacaaagccgtcacggtttttatcaaacgggcggcttgccgttttcggatcaggatttgtagaaagggctttgtttgcactgaagcctgcaaatgacattcttgtcagcggcgcttctgttccgcccgtaatcatcgcatcggcatcgccgcgctgaatgactttaaacgcgtcaccgatagagttcgttcccgtcgcacatgccgtcaccgtacaggagttgactccttttgctccgagagcgattgagatttggcctgtcgccatatcaggaatcatcatcggaacaaagaacgggctgacccttctcggcccttttgtcaggaagatttcgaattgggattcaagcgtttcaagaccgccgattccggacccgacccaaacgccgactctcggcgcgatctcgtctgtgatgttaagaccggcatcttgaacggccattttcgcggctacgacagcgtattgcgtgaagcggtccatttttcgcgcttcttttttatccatgtgattttcaatattgaaatctttcagttcagcagctactttcgccggatactcgtccgattccacacgtgtgatcggtccgattccggatacgccgccgattgcatttttccagcttgtttcggcgtcgtttccaagcggagacagggctccaagccctgtaacgactactctttttttactcatcttgtgtgcacctcacttttttttatcgtccccagcgtattgctatggcgccccatgtcaatcctccgccgaaaccgaccatgacgatgacgtcgccgtctttaattttgcctgcttccagttcctctactaatgaaatcggaatggatgctgcggatgtgtttccatatttatggactgttttagacatcttttcaaccggaagctccaaacgttcccgtgccgcttccatgatgcggatgtttgcctgatgcggaatcaaaaagtctacgtcctctttggagaggccggctttttcaatgacatttacactcgattcacccatttgccggacggcgaatttgaatacttctcttccatgcatgattgtatgccctttttcatctaagtacaagtgctggccgcctgtaccgtctgctccgagctcaaatgacagtatgcctctgtcgtcgctgaccggtccgatgaccgccgctccggctccgtctccgaacagcacagccgtattgcggtcgtcccagtcggtaatgcttgagagcttttccacgccgaccacgaggacatgtttgtatgtttgcgattcaatgaattgtttggcggttacgataccgtacataaaacccgcacacgcggcgctgatatccatcgcgcacgcttttttggccccgagcttctcttgtatcatacaggaaacggtcgggaaagactggtcaggagtaaccgtcgccacgaggatcatatcaagctcctcagcggaaatgccggcctgttcaagcgctttttgcgcagcctcagcggccatgccggatgaatacatatcttccgcggcgattcttctttcttctatacctgttctcgtacgaatccactcgtccgatgtatctaccatttgttcaagatcatgatttgtcagcactttttccgggatgtaacggccgacgccaagaattccagctttcattggaaaagactccttttttataatgaatttaaaactaattagttatgatcaattattagtatcaggtactaattctaccctattttttttctgttggcaatatattcgtctaaactatcggacgctgctcctcatagaataaaaggaagacgaaaggaggcttcactatggatattttctccaaaatgatgttcggcgattccagagaccgggataaagaaccggaagaaacccctgagcagcctcaggctgaaaacgaagaagagatcgattacaaccacgtgatgaatcagctggggtccatcatgaactctctggatcaattaaagcccgtatttaaagacttcgcgccgatggtgtccgctataaagaaaaaaatcatgtgaaaagccacttcatgaaaagtggctctctttatttattcagctccccggcatcagatctgccaagctcatacgcttccgccatgaccgatgtaaacaggtccataaacggctgaatcatttccatagacagatctatgccggatttctcaagctccgcctttgcttccggcaggtatttcatcgcgatctgcataaattcaagagacttttcatgctgcatgtgtatccacctctattcatttgacggcagttcatttgttcggttatacgtttttacaaggtctgagattttgtcttgaaatgctttgtccaccagagggctgaacgtccccatttcaacgactccttccctgaaatcaaagttgtgatctccgctcttgagcgtacctttattatattgctcggcaattaatgtataggctttatctacgttttgcaccgtgcttgtcagcaccgtgtttttgccgagattcgattgctcggccacatagccgatggcgtaaagcccgtcttttttgatttgctgaatgacaggaacattatacccgtctccggccggatatacaacatccgtgccttccgcttttaacttttcgtaaagatgcagcgcttcattgccgttatcccagtggtccgtaaattcagtattgacggtgatatcgggtttttcatatttcgcccctttgataaagccgtctacttcaggctgccacaaaaaggaggcgatgacgccgacctcattggtttttgacatatgggcggccgtcattcccccgaaaaagcccattgcttcacccataaggtgaacgcttgtgacattatcgcttttcgccgttccgtttgcgacgacgaattccatgtcgggataatccttgctgatcatattgaagatttcctcgtattcatttccgtgcccgtataaaagattgactccttttttatgaaaatcatctatcgcttttaaaatatcttcatcggatctgatattttctttataataaacgtcaacgttaaattcagattgtatcgctaataaacctttgtaaccttttgtgccccataccaagtcactgatggtatcgggaaaaagcattccgaccttctcaatttttcctttaaacggagtttgtgcgcatccgctcaataaaaggaggacagaaaagatcatgacaagcctggtgatcaagccatgttcaaccccttttcaaactcataacatgtataattgatatacgtttattgtagcggtaatgcacataacatggaaggtatttcttaaaaaatgtcgaatattgatgaaaattgtcttttccattctttaattttttcttccgcttccgttttttgcgttttttcttttatttccagggtaataatctgattttcgccttctgtgccgtcagcctcaagctgattcatcagcccgcagaccgcgtcttctaaaaagatcctgctttcgccatcttcttttgcttccgtccacggaccgtaaaggggaggaaggataatcgcttttgccgtatcccgctgaccgttttttttccagtctccgtgatcctcactataaacaatccaatataaaggctcagccctttcttcaggcagacacccgctcccgtattgaacgcagatacgatcatattccttttcaccgatttcatctattatttgaaaaagcccgtttctcgcgagccacattaaacgttcttctaaatacagctgcctcgttttgtcctccggttctgccaaaatgacatcgacatgcacaccctcatccatcaaccgttcgcacaatgaaaggccgagaaattcatctgctccaatgatcagcgctgtcttcatcacatctgccgcctttccggtttttcattcgcacacaagccaaacagccctctgaaaagagatggctgttgtattctattcattacaagtctttttcatgactgcggaaaaaccggcagatggctctgtacatacgcgcagggttctcaagcaggtgatacgtgatatcagtcttgctcccagtcttttcccgggcttctttatacgcgttcgcatgcagggtgtacgggtacggcgctccggtcgttctttgccatatatgtaccggcacgcgggtgcggcagccggtaatggtctgatagctcagtgagcttgcctctttttcagaaacaccgaagctttgtgccgtttccctcagaaactgcttataaaaaaacttattttctttctctgattcaaaatgggcttgaaggtcaagacaaggatctaacattgcggctgaacggatatgctccggtgaagactgcagcaattgatcggcgataagggcgcccatgccttctgcgagcaagtgtattttcggattgagggtttcttgtttcagcacataatgcatcagctgtctggcgtaaaggacggctttttccgaaccccaatgccgtccgtataaattgctgttgaaaatggtgtaccctctgtcaagcagcacatgtaacagctgctttctcccttcatgttcgagccaaaagcttgagtcccggctgacaaagtgggttctgtcccccagaataaagatacagaagccgttcggccgatacggcagatggatgacgttcagctcagatccgaattggaaaaatctttccgttatccccatgcctgcccgcctccttttactcctaatctctctattggctatcatatgtaagaagaatgaaaacggatcggataaactcctatttgctgctatgttttggctattatcccaagcacaggaaccgaattttccttcagacggcgggacaggcgggcacatgtcagtttcaggcgcgcttttgatgagaaaatgaccttccgcccgcgctttatgtatggtatgatacaacgtagaataaaatgaaggacgaggtggaaacgtgcggtttattatcggttttatttggacgttccttttaacacatatggcctgttatttggtcgcctccatgaacagcgcggcgtacaatttcaagcaatcatccgttattgccgtggttattgcggtgctagtctttgttcttgcggagatcatgcctgtcaaacaggatgcaagccagcattaaataaaaaaacctgctattcagcaggtttttttgtgttcacggttttcgttgatacgtccacaatctgttgtggtttgaagtttcagggaacatttctcccaccgtaagcttgattttttgcgggtttttgaccatgcttcccgtttcgccgatttcaacgtacacaccgttattcggcgctttttgtcccgggcggaattgatgctgctgtcccacgtcatttcctcctttttcttttttatgtagtatgcgcttgtatgcggagaaatatcaaaaaccgctgaatgagattcagcggtttttttgttcatcctgtttgtaaagaagagctttcaggagcgctttttgcgcgtgaagccggttttccgcctgctgaaataccgcagagttcgggccgtcgataatctcggacgtgacctcttcctcccgatgcgcgggcaggcaatgcaaaaatgtatagtcgggtttggcgagactgacgagtgaggcgttgacttgatacggggcaaacacattcagccgctgctgcgtctcttcctcctgccccatgctcgtgaagacgtcggagtaaatcacgtctgcatcccgcaccgcttcctgcggattttcggtaagggtgattttcgctccggaaacagccgccgcttctttcgcggcatttaccgcctcttcctctgcttcatagcctttcggcgaagcaaccgcaatgtcacagcccatttttgcgcagccgatcataagtgaatgcgccacattatttccgtcaccgatataggcaacttttactcctttcagttctccttttatttcttgtatcgttaacagatccgcgagtgcctgacacgggtgataccggtcggtcagcccgtttatgacgggaatgtctgcatgctcggcaagctcttcgactttttcatgttcaaaggtgcggatcataatggcatcaacgaatccggacagcaccttcgccgtatccgcgaccgtctccccccgcccaagctgcaggtcgctgcttgaaagaaatagtcccgttcccccgagctgggccattcccgcttcaaaagacacacgtgtgcgggttgaagatttttcaaaaatcatcgccaatgttttcccttggaaaatcggctgtatcggatgttgttttaataatgaagcttctgtcagaagcgcattgatgtctgacgggctgacatcttttaaggaaagaaaatctttgccgtacaaatgggttaatgtgtgttccgcttttattgtgtgcatgatgccacttccttttgataaagatctttgagcgatacaggctgaggtttgccggagccgcttgctaaaaatgcctttacggtttccggttcagtaaagaccgtcacaccgtgcgtcatggcttcaatccgttgtttacgcgcttcttcagagtgattgaaattgatgtggaccgctttatcctttcgctctgcccatgccgggaacgcatctttgcatacggtaaatcccgcctcttgagcctgacgttccaattccgcatcacagccttccagatagatgctgccttttttctcccagacgtgcgcgtagatttttttcagggcgctttctgcgtcaaacgcaacacacatgccttctccggtcgacttcatttccggcccgggctttacgtccacatcctgaatggcgtgcgaagaaaaaaccgggaatttcactgccgttccgtgctgattttgaacctcgggcttgatgtctttaagggaagcgccggccagcaatctggcggcaagcgggatcatcggcacccccatcaccttagacacgacaggaactgtgcggcttgcccgcgggttcacttcaagaacgagaatatcccctttgtcatcaatgacaaactgaatgttcatgatgcctttaaaagccagttttaccgcaattttttcggcggcctcttttatattccgctgcatatcaggtgtgacagacggacccggaagaatcgcaaaactgtcgcccgaatggacgccggcgcgctcaatgtgctctgtgtaagtcggcacgaatacttcatgtccgtcggaaatcagatcgatctccaattcttttcctgtaatgtactgatcgatcaaaatcggatacggcatgcccgcttcattttccagcagttctgacatttgcgcttctgaatcaacgatgatcatgcccatcccaccgatgacataagacggacggatcagcacggggtagccgattcggcttgctttttccgttgcttcttcttttgaataagcggtttcgcctttggcatgtttcaggtcaaggtcatcaagcagctgataaaacagatcccgatcctccagcgcatcaagggtttcaaaggatgttccgagcagcggaatgcccgctttttccagcggttcagcggcattgattgcggtctgtcccccaaactggacgatggcaaaatcaatgttttcatgttccgccacgtttaaaatatgttcggtcgtcagcggttcaaaataaagccggtcggcgatttcataatccgtgcttactgtttccggattgttattgatcataatcgtttcataccccagcttttgcagggtcagaacgccgtggacggcactgtaatcaaattccactccctgaccgatgcggatcgggcctgagccgatgatgagggcgcgttttttctcttttcggctgatatctccgtcgctttccccgaggtaggtggagtagaaataattcgtcttggcatcaaattcagcggcgcatgtatctacgattttaaacgacgggacgatgcctgatttctttctgagagcacggatgtcttcttccgtttttcccgtgagagatgcgatcatgacatccgtgaagccttttaccttcgcctgctttaaaagcggcacagacagatgatccccttcttccatcagcttgttttccaatgtgatgatatttcggaacacatggagaaaaaacgggtcaatttttgttttggcatgaatgtcttctatcgtttcaccgcggcttaacagttccatgacgacgaaaaatctccggtcatccggcgttaccgctaattcccacagctgattgatcgtacagccgccgagttcaggcaggcgggtgccgatcgttttcagctcaagggaggccgccgctttttgaatggccgcttccatatttctttcgatcgccatgacctcccccgtcgctttcatcttcgttccgagcgtgcggtcggcatgtttaaatttatcaaacggccagcgcgggaatttgacgatgacataatcaagcgccggttcaaagcttgcataagtagagcccgtcagcggatttttcagttcatcaagcgtatagccgacggcaagtttcgccgccattttggcaatcggatagccggtcgcttttgacgcgagagctgaagagcggctgacacgcgggttcacttcaatgacatagtactgtttgctgaacggatccagcgcaaattgaatgttgcagccgccgaccacatccagcgccgaaataatcgccaggcttgctgaacgcagcatctgatattcttcatccgttaacgtctgggacggtgcgacgacaatggagtctcctgtatgcacgccgacgggatcgatgttttccatattgcagacggtgatgcatgtatgattgctgtcgcgcatgacctcatattcgatttctttaaaaccggcgatgcttttttcgacgaggcattggctgatcgggcttgctaacagcgcctgtttaataagcgtctgaaacgcttctttcgttttcgcgattccgcctcccttgccgcctagcgtgtacgccggtctcagaatgaccggaaatccgatagactcagcgaagcggagggcgtcttcttcgttgtcgacgatttcgctttccggaacgggctgatcgagctctttcatcagggcgcggaactgctcccggtcttcgcctttttgaatggtttccaccgatgttcccaaaagcttgacgtgatgcttcttcagcacgcctgcttcttcaagcttaacggctaaattcaatgccgtctggccgcccaaattggcaagcagaccgtccggtttttctttttcaataatggcctcgatgctgtcggttgtgagcggttcaaaatatatttcatcagcaaacgcctcatccgtcataatcgttgccgggttgttgttgactagaataacgcggtatccttcttctttcagagccatgcagccctgcgttcctgaataatcaaattctgccgcctggccgatgatgatggggccggagccgatgactaatatgctggaaatggttgtatctttaggcatgagcgatttctctccttgctggtatcactttctctagaaattcatcaaatatccactcgctctcagccggtccgggatgagcttcagggtggaactggacgcttaatacgggaaggcgcttatgaatgagcccttccactgatgtatcattgacatgatgaaatctgatggacagctcgttttcgtcaattgatgcttcatcgacgacatagctgtggttctggcttgtcataaacacccgtttcgttttccggtcaatgacgggatgattggcacccctgtggccgaacggcagcttatacgtatttcctccgaaagccagggcaatcagctgatgcccgaggcaaatgccgagtgcggggaaatcactgagtaatgatgtaatccggttcatgtacggcgcaatcgctttcgggtcgcccgggccgtttgagagcacgattccgtcgggctgaatgtcgtaaacagcgttcatctgctgatacggaatgaccgttactttacagccgcgctttacaagtgacgaggcgattgattttttataaccgaaatcaatcagcgcaatatgccggtctccgttccccattgatgtgatgtcttcagactgcgccagctccgccgggttttctgttccggatgctgcgggaatctcccttgttgttgacacggcagcgttcatcgtgccgccggagcggatggttttgacgacggcccgtgtgtccacttcggttaagagcgggatgttccatttatttaaatactctctcaagcttgagactgcttcatggtgagaaaaatgttcacacgcttcatagacggcaacagccttgacttgaggaatcttactttcaaggtctttttcattaattccgtagtttccgatcagcggatacgtaaaaacgatgatctgacccttatatgacgggtctgtaagcacttcctgatagcccgtcattccggtgaaaaaaacagcttcgccaacacagcgggcttctttttcaagttcaccgccgaatgatgttccgtcttccaatactaaatagcctttcatctaaagcccacctcttgatgaataattaattaaaaatatgaatttttatactcttatatcgaaaaaaattaccgtttcactgccgaatgcgtttcgatcgctgctttcagcatactgacggccgacagcatttcttcttcagaaaccgtaagcggcgggagcagcctgatgacattctgtccggccggaagcacgagaagtccgcgttcctgcagatctccgatgatgccggacacggaacctgcgcattcaatgccgattaataacccttttccgcggatttcttttacaaaaggccctgtcaattcacggttcagctgcgcttttaaaaatgatcctttgtctgccgccgcctggagaaagtccggctgaaacacaatgtccaaggttgctttcacagctgccatggcaagcttattgccgccgaaagtcgtaccatgcgtacccggcgtaaaggcgtcgccaagcttctttttgccgatcacggctccgacgggaaaaccgtttccaagccctttcgcagcagtgatgatgtccggagagatgccgaaatgctcatagccgaatgccttgcccgtccggccgattccggtttgaatctcgtctgcgataagcagcgtctgtttgtctttgcaaaatgtctgtaaggcttcgatgaattccggatcggcgggattgactcccccttctccctgcaccgtctcaagcatgacggcggcgatatcatcctcttttgaaagcgtgctgaatgccgacggatcattgaacggaagatagtgaaagccttgaagcatcggtccgaaaccggtcttgattttgtcttgtccggtggcggccatccccgcataggtccggccgtgaaaggattgatgaaatgttacgatttttgtctttcccgttgctttacgggcaagcttaatggcgccttcattcgcttcggctccgctgttgcagaagaaaacgagatccccctcgctatgtccggcaagctttgccgcggctttttcctgaagatcattttcaaacagattggaaacgtgccatacgctgtcaagctgttctttcaccgcttctgtcaccgcatcatgacaatggccgagattggaaacggcgatgccctgaataaaatcgagatacgtttttccgttttcatcctctgcgattgtccctttcgcttttttgatatcgataggccagcggctgtaggtttgaaataggctgctcatgacacgctctccttttctttgacgatttttgttccttggaaggcttgatcggtgaaaaacgctccttttccgtttacgatcatcacttccgcgacatcttcactcagtgccgataatgccgagtttaccttcggaatcatcccccctgaaatcacgccgtcatcgatgagggcctgaatctcttgcggcgtcaaagtatccagcctgttctctccgtccataattccttcgacatctgtgacaaataaaagtttatcggcgtgtaaggctgaagcgacggccgatgccgcggcgtctgcgttgacgttcagcgtttcgaaatcacttgtcatggaaagcggagcgataacgggaatgattccttctttcattaaagcgtgaatgattgacggatcggttttttgtatttcaccgacttctccgtatttgtcttgattaaggtaagatgcttgaaggagaccgctgtcctttcctgatattcccgcggctttcagcccgtttttcgcgagttcggttacgaaaaatttattgatcgtccctgacaagaccatttccgctgtttccagcaccggtttggtcgttttccgctgtccatcgacaaattccgtttcaatctgcaatgttttcagcattcttgaaatgtccgggccgcctccatgcacgacggcaatgttccagcccgattgcataagctcttttacattttgaaaaaaatcggcggataactcgcggattacgcttccgccgcacttaaaaacgatggttttcttcatgccgctcccctttgttatgtgcgatagctcgcattgattttgatataatcataggttaagtcacagccccatgcccgaccgctgccggagccttcctgcaggcggactgcaatcgtaatctcatcacctgataagtactccttggcatcagtttccgaaaacggctgaggttcgttgtgtttaaacagacactgaccgccaaggaaaacttccacttgttcggccgttacgcttgccgcactgtgcccgatcgcgccgatgatgcgcccccaattggcgtctgtgccgtaaacggcggtcttcacaaggcttgagccgacgatttttttggcgataatattcgcctcaaggttatttttcgcgccttcgactctggcttcaattaatttcgtcgctccttcaccgtctctggcaatatctttggcaaggtcttcgcatacaagctttaacccctttttaaaagccggccagtcagggtgatcctccgtcaggcaatcattccccgcgcagccgttcgccatcacaagcaccatgtcattcgtcgatgtttctccgtcaacggtgatttggttaaatgaaacatccgtaatctctctgagcgcgtttttgagcgcctgttcttccacggccgcgtccgttgtgacaaagccgagcattgtcgccatgttggggtggatcatgccggagcctttcgccgctccgccgatcgtgatgatgtctccgccgatcaccagttcataacacgtctgtttcgtcactgtatccgtcgtcaaaatggcctcttcaaatgctccggacacggacggtgcttgaccgagctgttcgatgcccgcttgaatttttttcatgtctaaaagctcgccgatcaccccggttgacgaaaccgcaacaagctccggctcaatgccgagctggctcgcgaagccgtcccgcatttcataggcgtcctttaatccttggtctcccgtacaggcattggcaatcgcgctgttgacgataaccgcctgaagcacaccctcttttttcaggctggcttgcgtcactttcagcggcgctgcctgaaaatggctctgcgtatataccgctgcactgactgcaggcgcttcgctgataatcgctccgagatctttttttgaatagcgcagaccgcagtgcacgccctttgcctcaaaccctttcggcgaggatacgccgccttttattttcgtgatttcctcactcagctgaatcatattttcgaatccctctttcgttctatggatagactggcgtcatcgtaagtcccgtttcttcctgccagccattcatgatatttaaattttgaaccgcctgccctgcggcgcctttcatcagattatctatgacagaaacgatggtggcacggtttgttctttcatccacggtgacactgatatcacaaaaattgctgccgtatacctctttcgtcgccggaaattcaccttccggcctgattctgacaaaatatgaatctttgtagaattcggaatacaattctcttacctgtgcagcagacatacccgggggagcctccgtatacatcgtcgccataatgccccttgtcatcggcgccaaatgagcggaaaacgtgatcgggcctgtgccgggctgccaagccgctaattgctgttcaatttccggagtatgctgatgctcattaaccttataaattttgaaattatcattcagctcagaataatgagtgcccattgatgcttttcggccggcgccggatacgcctgttttcgcatcaacaatcagaaatgaatcttgtaaaagcttattctttgccagcggggcgagcccgagcagtacagcagtcggaaaacatcccggattggcaatcagctttgcagtctgaatctcttctttttgcaattcagctaaaccgtaaaccgcgctttgaatcgttcctttcggagcggccttccgcttataccacttttcgtacacggccgggttttgaatccgcaaatcgccggatagatcaatgaccggaatgcccgcctccgccagcttgggcgaccactctccggagacgccgggcggcgcggctatgaacatgacatcaatttcgtttcggatcgtttctatatgaagcggctgaagtgattgtgacgctatattcctcaaatgcggatatgaagcggcatactctttcccttcgtcgctcgatgaatataatatacaatcctctgcataagggtgatggttaagaatcctgacaagttcggcgcctccataaccagtagcgcctataatacctattttcaacgggttcaccttcttggtttttgtgaaattatttaacattataacatgaataaaaattaattcaattgtatatttaatattttttcattcattttccatctgttttcgctgacaaaaaaaccccctctcgatcgagggagttccataagaaaaacaggctgatcggatcagcctgttttcttcagcatcatcagcccgcttataaaaaacagcacggagctggcgtaaaaaataatataaaccgtaaagaaatcagcgagaaacccgccgagaataatggcagcagctgaaaatacggccgtccagaaatgatagctgccgactttttttccccgctccccgccgtcggtgtaatcggcgatcatgattttctcgccgtgtttttgcatcgcgccgaacaggcccaaaagcacctgcacaacataaacctggtgcacgccggtaatgtgcgggagcgtcagaagaagcaccgccatcccccacgaattcgccataaggaaccagcgggggtccagtcttgccgacagccggccgagcagcggatgaatcaatgcgccgctcaggccgaacaagccgtatgagagaccgaattgcgtgtagctggaaccgatgtttttaataaataaaatataaaacggaaagatcaggctgccggcaaaaaagacactgctctgtgacaggatcagccattttaaatggttgtgtttcatgatttgtacctctgataaaaataattcataaacaagtcatccggatcatatttgtgttttttctgaaagaacatatcgcttttcggatatgcctcccgcatctgctctttcgtttggtacagcatatacggcagataatagctgccgcggtggcgcaatgccgtatccgtcatttttctgacaatccgcgccgcactcgcctggctgtcttttgaaaacccttcattgattaaaagaacgagtgaaaacatgtcttcctttgcgtatgacaggtcggctttttcatttttttgcacgtagcggatcgtaatatttacaagattgagatcttcatgtgacagcgtcttgcgtaagtcatgaatgtacggcgcaaattcgccgacgggtacgaagtattcttgtagcacgtcggtgttgtccgtgttttcatattccaaaaatttcgactctgaccgcatgacattgttcctggagactttcacgccgttttggctgagaaaataagactgctgagttgaccagaaccaatttctgccccagtcataccggcgggagaggccgagcgcgaatttcgtcagcgccggatgctcatcttctttcagttcattgtgccgctttaattctttctgattgtctgagagtgtgtaatcagtcacatacatatcgtgcaaaaagcctttatcccctgttgcgatccgcgcgagatgcatgcgcacggcggggttgcgctgaacatgctgcgtaaaatattgactgtatgtatcagcgttcatgcgtttcgttttcatttcataaagctcatcatccgtcagctcaatatccgcgtcaaggatgacgccgaacaggccgtagccgccgatgacagctgaaaacaggtcatctttaggagtaacggtgatgactttgccgtccgcctttaaaagatgaaacgatttgactgtatcaatcagcgaaccgtaccggatatcccggccgtgggcgttggcgctcagtgagccgccgatcgtaaaaatgttttgcgattgcatgacttttaccgcgagcccgtacggattgacatagcgctgaatatcattccacgtcgctcccgcctgcaccctgatgatttttttctttcggtcgagaccgagtattttgttgtagcccgtcatgtcgagaacgatcccgtcttcataatacgtctggccgcccattgagtgctgggcgcctgcgattgagatcttcagatgctttcgctttgcttccttaatggtttcgaccaatgtttctttctcttttcctttgaccgtctgcttaattttcacgggcataagtcggctgacatccgtcattgtccctgcctgctgctccggctctttgtgaaaagcggaaacagcgaacagcgccgtataaacaagaatgctaaggataatgagaagtaattttttcttcatggattcctccctcgcatgcaaccggtctattatatcatgcctcacgtccgtttttttcctttttaacccgataccgcaaaaaaccccgaatggcgggaaactcgggtttttttagtgacttgcccttctttccgcacgccggtctctagcgacaaagcagacagaacggcgcccgacagaatcatgtttagtacagctcgaaacggtcagccggaaaacaccgggcataaaaatacacagaaatccttaaaatgattttttggtcagtatataatcgatatatacgcagatgtattaccaaagggattgtttaaaacaaacatgttaaatgaggtggggaaaataaacataaaaggaatcaatcatcttcttttttctgtttcaaatttggaaaaatctatagaattttatgaggaagtatttcatgcacgactcctggttaaagggcaaaaaacagcatattttgatctgaacgggctttggcttgcacttaacttagaggcggatataccaagaaatgaaatacataaatcctacacacatatggctttttcaattgatccaagagattttgatgcaatacatcaaagattaaaaaatctaaatgtaaatatattaaatggacgtccaagagataaacaagatcaaaagtcaatttattttactgatcccgatggacataaatttgaattccacacaggtacactccaagacagactgtcctattacaaaaaagataaacctcatatgaaattttatatataaaggtttgtttgcgatccaaaacaaatatgcagacaaaagaaaagcacctccaaactttaggatgtacctaaaatccgaggtgcattttcttattactgaatccctaatgcgatttttgcatagcgtgacattttgtctctcgtccacggtggattccagacgatgtggacctccgtctcttttacatccggaatgtcggcgagcgcttttttcacctcgtcgacgatgatcggagcgagcgggcaccccattgatgtcagtgtcatcgtaacgtgcgtcaggccgtcgtcatccatatcaacgtcgtatacaaggccgagattgacgatatcgacgccgagctcagggtcaacaacctgctccaaggcgcccatgatgttttcttttaatgcttcttccacgttccatcactcctttttcctcagtataacgtaaaagcgggttttgttaacacctttgtgctttataaatgcttatcgaaccaggcgacggtttctaaaacggcgtatctcgggactttatggtcagcccgttcatctttcagaaactgaagatggtcaggccggctgctgtaatgaggtttaatcgtttcataaaagccgcgggtcggtgcatacggaacgactttgtcttgaacgccgtgccagaacagcagcgggcggctccggagtttttccggttccagactgagatcgaacggcttgagccgcgcaaacagttcctcgacctgttcttttgtgacatcaatgtcgatgtcctgcttttgaatgtggtcaatctgctgctgaaaaaacgccgtatagttcgggcttcccatcaggctgacgccggctttgacccaatcatacgcggccatcgcgccgaatgtcgtaattccgcccattgacgtgcccgcaagaccgatccgcccgtcttcaatcaggccgcgcgcttcaaaatcctttttcagcacgtcaagctcctcgatttcatttaatacaatgtcccaaaaatggacggcgagctcttctgctgacagctgttcagcgcgttcaccgtggtaaagagcttccggcagcaccgccctgaaacccttttcagcaagcaggtaagcgaaatgaagattatgctccttcgcgcttgtaaaaccgtgaataaagaaaacaaggggagcgggacggtcccgattttcttcttttacaatatgtaaaaacggaatgcctgatacggtttgatgatcaataagaatcacgttgactccctccttaggataaccataatcataagtgtaacatgtagacaataaagatggtaaaaagctacactgtacataagagaaaaacagcaaattatatgacaaaaggagttatttatggagacaaaaccttacctcatcgccttagatctggatggaaccttattaaaagatgataaaaccatttcccctgaaacggcacggacgattcagacgctgaaagaagcgggccatcatgtctgcatctcaaccggccgccctttccgttccagttcgatgtattatgacgagcttgggctgacaacgccgattgtcaattttaacggggcgtttgtccaccacccgaaagacgagtcatggggacgataccacacgtctttatctgtcgatgtggtcagacagcttgccgaacttacagagacctatcaaatacataatgtgctcgctgagatcattgatgatgtgtacttccattatcatgatgagcatttaattgaggcgtttcatatgaatacggcgaatgtcacattcggcgatctgcgcgaaacggtcaaagaggatgtgacgtccgtattgattcacgcgaaggaagaggacgtcgcggacatacgcgcgcatttatccgatgtgcacgccgaggtcattgaccacagaagatgggcggctccttggcatgtgattgaaattattaaacacgggatgaataaagcggtcggcctgaagaaaatcagcgactattaccaagtgccgagagaacggatcatcgcgttcggcgacgaagacaacgatcttgaaatgctccgatttgccgggtgcggcgtagcgatgggaaacggcacggatgaagtcaaacaggccgccgaccgcgtcgcgggatcaaatgaagcggacggaatcgccgaatttttaaaatcctatttctccctgtgaggttttgccgctcataacacaaagccttccgcccatactaaaacagacgactcatctcgtctaaatatggaagggggacattgcaatgggtaaacgaaacaaatcaaaacggtttattcagcaaggcaaggactctgtcagtcttcatgacgcaagatttccatatcggtctacattagaggaagcacagcatgatgcagcaaaagattcggctgaaaggcaggttgacttttaatgagaaacgaactgttttctcaagccaagtcatttgtccagcaggccgtcatgattgctaacggtttcgaggacggcgatcaggaaaaagctgtctcacgcgccaaaaatgccgtatcttccgcgtacgccaattcgacagatgcagaacgtcagcagctgcaccaatttcaggatcagctggagaaattgaaataaaaaaaggcgccccgttaagacgagggcgccgcttttttatttcacttcaaatgtttttaccgttttcagcctttttccgatctgatcggacttccctaaaaacgtcaccgtcaccgtgtatgttcccggaccgggcacgttcttccacacatctgaaaagtcatacgtttcattcggcattaaggtcacggtctgaaacgcctgagtaaacattttgtcttttgaatagcggtacagttctttgtgatgttggtcatgtacggtcaattcgaatttctgccctgagctgaatgtgaaatcgatcgggctttcgcttttgttttttaaagacatttgaaattcgatctgctgatccgtctgcacagggtttacggctaattccgcttgctgttcattcatctctccggatacctcctcagcgggctccttctgcccggattgactgctgcatccgatcagtaaaatgaccggtaataacaggccaaacagccacttcattctatccgctcctatcagtctttcctgaagaaaccaaagatccccgtcgtttgcacgatgtttgtgaaggctttcgggtcgacttctttcacgattttctcaaggtcatacaattcgtaccgcgtaatgacgatgatcatcatttctttctgttcgtttgtgtaagcgccttttgccggcaccgtcgtaatgccgcggaccattttcccgtaaatcgcttctttgatttcatcggctttttttgtaacgatcatggcggtcagtttcatgtggcgggtgtgaatggcgtcaatcacccttgttgtgacatacagagcgacaagggtatataatgctttctcccatccttgcaataatcctgccgtcaaaatgataatcccgttcaaaatgaagaaatatgtgccgaccggcttatccttccatttggccagcaccatcgacacgatatcaagaccgcctgtcgaagcgccgaatttcagcgttaaaccgatgccgatagctgagatgactcctccgaatacggtattcagaagaatatcgtgcgacagtctcatttccgggagaattcccataaagacggacgtcatcgctacgcttaatatgctgtatacggtgaatgatctgccgactttcagccaccctaacacaccgatgggaatgtttaagaggaacatgagaactcctgtcgaaatataaaagggggcgtattgatcaacgacgcttgacagcagctgggcgacaccggtaaaaccgctggcatatacattcgccggtatcaggaataaattcagtcccgccgcatacagaaacgcgccgatgacgacgattgctaatttttttgcttgttctagtaccatggcttgctcctccgctcattttcattattagcttttcccttaaaacaaagttttgaacactattttgccacatttatatgatatagttggcatcactctcaccaatcggaaagaagggaattatgatgacagttcaccttattgctgacagcgcctctgacctgccgaaatcttatattgaagaaaaccggatcgggttcattccgctgcacgtaacacttgacggaaacgaatatgaggacacggtcaccattcaggcggatcatatatttcaagcgatgcgggacgggaaagttccgaaaacatcccaggcatcaccggatacgataaaaaaagtatttttacaatacgcggaactgggagaaccggcgatatacatcgccttttcctcaggtctttccggcacctatcagacggccgtaatgatcgccaatgaagtaaaagaggaatttcccgattttgatttacggattgtagattccaaatgcgcttcattgggctgcggcctcgcggtgatgcacgcgcaaacactctgtgttaacgggaatacaatacaagaaatcgaaacgtctgtaaagagcttttgcgcacggatgaaacatatatttacggtcgatgatgtcgcttatctcgcgcggggcggcagaatttcaaaaacgtccgcttttgtcggggggcttttgaacatcaaaccgattctgcatgtggatgacggcaggctcgtgccgctcgaaaaattgcgcggacaaaagaaactgtttaaacggattatagaaatgatgaaggaagaaggcggcgattgggcggatcaaaccgtggggatcagctacgcagataacgaggagacggcgcttcggatgaaggaaatgattgaagaagcgttccatccgaaagagatcattcttcattcaatcggctctgcgatcggcgcgcactccgggccgggtacgctcgcgatttttttcctgaagccataatttcaatgcgggcgggcatcctaacggacagaagggaggctttgccgcatgaaagatgatgacaaaaaaccgttggacaataacgccgtaaatcagaaaaagaaccggcttgccgaaaaaaaccggcaggcgggaaaaaaccagaattccaaaaaaccggaccatctgtaaaagcaaaacagccctcttgtcttagaagaaagagggctgttttttgttctatatgcgtctaacatcacttatcacgaatccgctttcaggcaatgccggcattctggacaggctgaagctcaaatcttgggacggaacatcgtactctatttcattggcaagaaacgcaagggaagttttcatgacttccacggtcattccctcacccggacagcggtggccgttagccggatcacctccgccctggggaatgaaatcaaatttattttcctcccgcccctgaaaacgttccgggcgaaattcattcggattctcccaaagccgggaatcatggtttgtcccatataggtcaagcatgacggaggcaccctttttaaactcacagttcttccatacgaaatcttttttcacaacggctcctaaaaacggggcaaacgggtaatacctccgaacttcatgtgcaaatctttcggcctcctgatcatctctcgatctcagtttgccccgatattcagggtaatcatgcaatgcaagagctgaaaacgtaataaagtaagaaatggcggcaatcgggcgcagaacattaataagctcaacagcagccatgtgagaatcaagtctgttcccgtcaagttctgtatgaaaagccatttcatacaaggctgagccctccagcgtttgcagcttgtcggaccgcacatcctcaatgacctcctctatccatttctccgttttcagcctcgcccttctgcctttccaatgacgcggtccgacagcgccgaatgcgtctaccatatcggtgaaatcctccgcccgctctttcacttctgagtctttcagcgggacgccggcccactcacaggcagcccggcacagcactttcttcgcttcatcaaaaaggacaattcggtttgaaccctcccacatttccgcagatgctttccactgttttgccaccgcttccgcaagccgtttttgccggggcggcgtcatcagtgacataaatagaagcttcctgtgcttatgccgttcaccgtccattgcctggattgcccctgttccgaataacgttttctgcacccgtttggggagggcctgctgccgctgaaatcgttctgtgtcataaaaaagctttgcggcttccgctccgctcatacaaatgaatgtcttccctaataaacgggcgcgaaacacatccgagcgataattctccgctcggtttttcacaaatacataaccatcacgtaataaagccagactattatcaagacccttttcatgcggaatttgttcatccatcccgattcctcccttcttttttcacctttcacgaaaaagaataaatataaacacatgtatattcagtatttgtgtttcattcagaagttactcatgtcaggctgcaaaaatcaggggcggggcaaaagcccgttacaaagtaaaccggcggacctgatcgtttaaccgctctgtcaggctcaccagattattgacgctttccgccattttatgaaaagaagacagctgctcaagcgcggaggcagaaatctcttcgcttcctgcagccgtttcctgaacgacggcgctgatgctttcggcatgatgcagcacttgctcaccaagctgtttagattcgatgatccgtccgtccaattgagtaagctccgctttaatatgggcggctttttgttcaatatggacgaatgattctgatgttttctccatcagctcctgctgtctgtccgctaaagcgacgccggtcgtgacagctccggtaatagacgtgatgccgtcttcaatttgctttaccatatcgaaaatctgcgcggtcgctttggctgatccgtctgcgagcttccgtatctcctcggcaacgacggcaaatccttttccagcctcgcctgctctggccgcctcgattgcggcgtttaatgacagcagattggtctggcccgcaatgtcagaaacggtctgcgccatcatactgattcctgccgcatgctctatgaagagaccggcggcttcggaaatctcttttgatgtctcattgcttttatcaatggcttgcttggtctcggctaaagcaccgcgccccgcagccaccgccgcaatcgtctcttcactgcttctcgtcgtttgtttcgaacgttcggcgttcgcctttgaatgttcatccatttgttcaatgaattgcaccgcatgctgcagatcttctgaaatggtttgggagccttgcgccatttcttccgtcgacacggacacctgctcggtcatgtccttcagcgtctggttttccttcgtcaaaccttccgcgaaagtctcgacttcacggccgacctctccgatcgcctgaattaaggtgcgaagctgttcagccatcattccgaatgagtcattcagctctttcagttcgtccttccctttataatcaagcatttcaacagcaaggttccctcctgcaatacgacgggcattttcagccatacggcggatcggccctgcgattctcttcgtcagcctgatggaagatatgacggtaacagtaagtatcacgatggtcagcacggctgcgctgtaaacgataaactgaatctggtcagccgtctgcttctgcatgtcttcatagtgatcccggcttttcagattcagcatataaatatcattcagaagaccgttgatgcgggccgccgtccttgtcgcttcagccgggcttttcgaatcaagagcagcgtccgcctccgcctgccatgtttcgtattttttggcgagtttgtcataagcggctttgtccgcatcgtccgtcatcgtttttttgagcgccgccagtttgtctgagctgcttttcatatagcttcgcacatcttctttctgggcgtctgcgagcgtataggaatagccggtgatgctttcttttaacgtattaaggtcagcttttgcttcctggacgtttaacagcgcgcccacttcatcttcatttgaagcctgaatcttcatcatgtttacgatggtaaagccgatgacggcggcgaagcaaatcatcgtaacggctgcgttaacgagcagccttgtccgtaatgtcacttcagatcgcctcctttttcaatcaggctgtttttcatatccgtgatctttttcgtcagcccgcctgcgtttttgacaactctgatcttggctaagtccatgccgttttccttcagtccgtaaacgatctctccgcttttgatctccttgttgtcttttaaatctttcgccaattcatagatgacttggtcgacgtttttcactaaagaagagataacggcgtgctcggcggtgtaatattgatcgctgtcaacaccgatggcgtatactttttgcgcctccgcttctttcagtgcgccgacgcccgtgaagccggccgccgtaaacaggacatcggctttttttcggatcatgttttgggcgatgcgcttcccgagcttatcatcgtcaaacgtaccgctgatgtccgacagcacgcggatattcggtttgactgatttcgcccctttcaggtagcctttcttaaaccgtttaatgacgtcggcatctgaaccgccgataaatccgatcgtgccggttttgctcgtcatggccgccagcgctccggctaagtagcttccttcatcctctttaaaagtgacggaggtaacattatccaggtctgatacggaatcaatcagcacaaaccgctgcttcggatattttttggcgaccttttctaaatccgcctgcatgctgtaaccgagccccaccacaagatcattgccttcccggacaagctgggtcagtcctttttcgtatgtaccggtatcttttatttcccggtaatcaaatgtgatgccgagctcgtctctcgctttcatcaaaccttgaaagcctgaatcattaaatgattggtcgccgaggccgttgtctgtcagcatgatgccgattgttttcgttttatcggccgccgtttcctcagatttgccggcacatcccgccgtgctgagcgcaatcagcagtacagccgcaaatatcgccatttttctcattgaaactctccttttgtttttttctatagttatatatcggttcggatgtcagaatattttatttcaataaaatatgtatgttcggcagggtgataaacaaatgagggccataggagcttttgagaaaataaaaaacatcggttttggttcaccgatgtttttgcagaaaatttattgtttttcgtatgtccagccgtcttcctgatacactttgccgtttttcatcaggtgcccgagcgcccgcttaaaggcggctttgcttaaatgaaaccgttcgcggatatcgtcaggatggcttttgtctccgtatggcatcgcgccgtttcttgatctcagataggtcagaatctcttccgcgtcaaccgaaagcgcatcctgctttctcggcagcagagacatgttgaccgagccgtcttccttcacctcgatgacacgccctgtcacgcggctgccgagtctcggctcatcttttctttctgaagggtgaataaacgcgcggatgccttcatcggtaatcagaaaagatcctgatgcaatcagtctgtacaccgtgcctgtcaggtctttattcatgacgtcttcctctgcatccgtaaataattcactgatgatatcctcaggcgccggtttggcaaacatgcgcccgcggcttgtcaccttcagcatgcaatacagtctgtctcctttttgcggccagacggatttgtacggaggcaggtgctccgttgcgacgagcgcgtcttttgacagaccgacgtcgacgaatacgcccatatcttccacagcgtccgtcacttccacccatccgtagtcataaaagctgatgagcggctttttcatcgtcgccgcgagtctttcctgatgatcgacgtaaataaatacgtccacttcatctttgtcttcgatatcctctgtgatttcactgttatgtaaaagaaccgtatcctcgccgtcggttaaaaaataaccgaaatcggtttggtgatctatactaagcgtgagctgctgccctggtctcatgttatcgtccttcctgattcgcccgtatgaggctgatgtttttctcattttttccaatacgcataaattcatgccttatgctgttggacatttctctttattctactataatcaactcataagtgaaatgttataggaggttttctcatggcaaaagaaagttcttttgatattgtatcgaaagttgaatttcccgaagtgcagaatgcgattcaaatgacgctgaaagaaatcggcacgcgctatgactttaaaggatcgaaaagcgatgtaactttagaaaaggaagaacttgtcctgatttctgatgacgagtttaaactgaatcagctcaaagatgtgctgagcggcaagctgatcaaacgggacgtgccgacgaaaaacattgaatacggcaaaatcgaaaatgcatcgggaggcacggtgcgccagcgcgcgaagcttgtacagggcattgataaagacagcgccaaaaaaatcaacgcggtgattaaaaactccggcttgaaggtcaagtcgcagattcaggacgaccaagtgcgcgtcaccggaaaaaataaagatgatctgcagcagattatcgcagccgtccgcggggcagacctgccgattgacgttcaatttattaattttagataaattatgtgattcctattgattattgtctctattttcggtaaatttggagaaagggattttcacagttaagttttggaaacccatgacaattacatgaacgttcttatcaagagaagccgagggactggcccgacgacgcttcagcaaccggtgtagtggtttacccaaaccatgaccaaggtgctaaatccagcaagctaaaaacagcttggaagataagaagagagacaaatgattacaaagtcttcttcttaagaagactttttttatttctcttttttccttgctgaatgtgacgaaggaggcaaacaatgggactattacaagacttaaaagaacggattttaatcggtgacggcgcgatgggcactctcctctattcctacggcattgacagatgttttgaggaactgaacgtatcaaagcccgaggaaatcaagcggatacataaggcttacgtggaagccggggcagacatcatccagacaaatacgtacggcgcgaattttattaagctctcaagatacggacttgaggatgaaacgaaaaaaatcaatcaggaggcggtcagaatcgcgcgcgcttcctcagacggcgcttatgtattgggaacgatgggcggcatccgcacctttaacaaaaacgcctacagcctggaggagattaaacgcagctttcgggagcagctttatttattgctgcatgaagagccggacggcctgcttctggaaacatactatgatttagaagaggcccgcgaagtgctgaagatagcgagaaaagaaacggaacttccgattatgctgaacgtatccatgcacgaacagggcgtgctgcaggacggaacgccgcttcgggaagccctcaggtccattgccgatctcggcgctgacataacgggaatcaattgccggctcggcccgtaccacatgattgaagcgctcaccgaagtgccgattttgcgtgacgcttatttatcggtctatccgaacagcagccttccgtctttagaagaaggccggcttgtttatgatacggacgatgcctatttccgggagagcgccgtacagttccgcactcagggcgcgcgcattatcggcggctgctgcggtacgacacccaaccatatcagagccatggctgaagcggtccgcggcctttcccccgtcactgagaaagaagtgaaaatcagacgggaagaagaagtcatctcagtcagcaacgaacggaccgagccgggtttaaacgaaatcgccgctcaaaaacggtcaattatcgtggagcttgatccgccgaaaaaattgaattttgaaaaatttatgcaagcggcggctgaattaaaagaaaccggcatagaagcgctgacgctcgccgacaattcattggcgacaccgcggatcagcaatgccgcctgcggttcattgctgaaagagcgccttgatatccgttctctcgttcacattacatgcagagaccgcaacatcatcggccttcagtcacatttaatggggctggatacgctcgggctcaccgacattttagccatcacgggcgatccttcaaaaatcggcgactttccgggggctacctccgtctatgatttaacgtcctttgacttgatcaggctgattaaacaattcaacgagggcatttctttatcagggaaaccgctcggcaagaaaacgaacttttccgtagccggagcatttaatccgaatgtccgccaccttgataaagcagtaaaacggctggagaaaaaaatcgagtgcggagctgactacttcgtgtcccagcctgtctactcggagcagcagctcattgacattcatcatgaaacgaagcatctcaaaacaccggtgtatatcggaatcatgccgttaacgagcagccgcaacgcagagttcattcatcatgaaatcccgggcattaagctgtcagacagcatccgcgaaaaaatggcgctcgccggcgaagacaagcgaaagcagaaagccgaaggcctcgccatcgccaaatcgcttctcgacacggcgtgcgaactgtttaacggaatttatttaatcaccccgtttctccgttctgatttgacgtcagagcttgcagcttatattaagcaaaaggatgaaaagcgggctgatgtatatttgcattgacgcggaagaggccgcctgatatgacaggcggctttttcatggtacgatacagaaaaagaatcaagcaaaggaggattttttcatggttgaagtaaaacccatcaccgcagaagacacatacgcgatcagacacagcgtgctgcgcccccatcagacgattgaggattgtaaatatgatcaggacagcgtcaaaggagcctttcatctcggaggtttttacgacgggacattgatcagcatcgcttctttctacccgcagaaccaacaggctttacaggcagcgcccgcctaccagctgcgcggcatggcgacgcttgaggaataccggacgcaaaaagcgggaagcacgttaatcgcctatgcagaacggaaactggcagaaatgggggcagcgcttgtctggtgcaacgccagatgtcacgtaaagggatattacgaaaagctcggctggaaaagcacgggcagcccctttgacatacccggcatcggcccgcatgtgatcatgtataaagaactcgcctgaaacagacaaatgcctttggggacatgtctctaagggcattaccttgaatgtcacgtctgcttttatatgcgacactattgacgccctcccgcttttttaataccctttgtacattacacaacagcaaggatggcaggcagaaaacgatatctgtcaattgccgttttcagctattaattcagaaaagggagtatgagatgaatacgatccaaaaaccgaaaatcccgaaagaattgccggtgctttctttcacagaagcgcttcaggacgacctcatcaaagaagtcgtcatagaaaacgccgtgataagcggcaaactggacggcctgcgcgccgaaaaagtcattttcagaaacaccgtttttacggatgtctctttcagacatatggaatgtacggatgtcctgtttgacaaatgtgatgtctcaaacgctgatttcagcggaagcatcatccatagaacggcgtttcagcattcaaaacttctcggcttgaatctggcggattccgccatgcgtcatgtacggtttgaagactgcctcacacattacagctccttcagctattccaatatgaagcatgtccggtttgactcgtgcggtctttcagaaagtgagtggaatgatgccgttcttgaatacacagatcttgacgcctgtgatttgaacggctcaaattttatcggcacgtctctttttaatatggatatcagcacgtgcacatttgatcacctgcacgtctcacttgagaagctgaaaggatgccgcatctctccgtctcatgccgtgacattcgcagaagcgctcggagccattgtgacgtgatcttttattaaacgaaacggcggtcggcatcctgaataaatgctcggcattggtgatgtggggtgctgttttttattttgcggcgcttttgtttcgataaaaggaattcggccaggtcatgttgaatgtaccggaaggaagagggggaattggaatgtcagacattttaaagctgtatcactaccacagatgggcaaatgagcaagttattcagcatctgaagaccctgcccgcggcaagcttacagcagaaactggatagtgtttttccgactgtgaacgccgtgcttgtgcatatataccgggctgattacatttggcttcacgtgctttacggagaaactttcgaacaaatcgtctcgcagtttgatcaatttgaaaagcttgacggagattttgaggcgattgaacatagaatgactgaactggacaaagaattcagcgaatttttaaaagaaatggagaacccggaaggtccgatctctatttctcatccgcgcatgggaacgcttcagacgacatatgccgatgtgatccggcatgttgtgaatcacggcacataccatcgcggcaatatcaccgcgatgcttcaccaaatgggctataaaggcgtgccgactgactacatttttttctcatacgaatcataaaaaagcaaaggcctcccgggcctttgcttttttacttcgaatctatcataatccggcatagccggaggcgcccggggtgagctttacaagccttccggttttaaaagattccgtcgcggcgatcccgatttctaagttaatcgcggcatcgatgtctgtcacaatcggcgtttccccttttttcacacattcggcaaagtgctcaagctccagacggtaagcgtctttaaaacgtgcttgaaaatccggaataatttcgcagctgctgcctgactccgttaaaacggtgacatggcttttccgcagcgtgccgactaaaatgcttcccgccgtcccgatcacttcggcgcggataaaccgcctcctactttttgttctctggtattaggtcagtccgttttccggcttacgaatttgcggtattcaagcggcgaaatgccttcaatctgtttaaacagtttggaaaaataggtcgggtcttccataccgatggcatccgcgattgtccccattttgtcattggttgcggacaaaagacgtttcgcctccgtcattctgactttattcgtatactggccgggcgtgacgccgagcacctgctgcatacagcgggtcacgtagtcttggttgtaatgaagagccgatgaaagcgctttgatggttgttttctcctgatagtgctcctgcaggtaccgggcggcctcccatgcgactctttcctttgcggacgggatttggaacgcctccttctgaagatggagcagcagctcttcaaacagaatctgctttctgagcggcaggtcggagttctcggcgctgtcatctgtcagcacactgaattgcccggccataaactgcggacgtctcaccttccctttttgcggcagggacaggcggtagcgggacggctcttcaaagctccctttttttcgcctcagctctgaccagttgttcccggttgtttccgtcacctcgtaatccgctccttcaaaatgaagccacgaataggatgtcgtttcttcactgccttttgtcccgtaatgttcaaggccgggagaaagcagaatatattctccggcttcaacggaaaaggcgttttcgtcttctgtaatgtagaggacgccttctttcacatacagcagatcaaacaccgggaagacccgtctcacatgggtttcgccttttttgaacactccttctcccgcagcgataaagaccgggaacggaggaactgtgaactcgagaaaggacatattttcggccctcctttttaagtcggatttttgcaagaagtttcgtttctctccctttttattataagaaaagggaggtacacttttaaacgttgattttttcaggaaaggggttaaaagaaatgaaacaagcgattttaaaacgggctgcattcaaacaatcctctgatcacaaactctcattatacgcgctgacttggccgatatttattgaggtttcattatatatgtttatgggaaacgcagacactcttatgcttagccaatactctgacaacagtgtggcggccgtgggtgtcagcaatcagattttaaatttaattatcgtgatgttcagctttatcgcaacgggtacgacaattgtgatttcacagtttttaggatctaaacagaaaaaagaggcgcaggaagtggcttatgtatcaataggagcgaactttgtcatcagtctcgccatcagcgccgccatattttttgcggccgttccgctgcttcatgtgatgggtctttccaatgaattgatgccggatgccaaagtctttttgcaggtggtcggcgggctgtccttcattcaggctttgattatgacgttcagcgccattttaaaaagctacggtcatacgaaggatacgatgttcgttacgatcgggatgaatattttaaatattgccggaaactttcttgtcattttcgggccgctcggccttccggtgttaggcgtcgccggtgttgcgatgtcaacgtccttcgcgcggatcatcgggctgatcgcgatgattgtgatcgtcaaaaaacgcatcggactcggtctgacatggcaaaagatttttcacgtccataaagagcacttgcggaaactcctgaaaatcgggattccgtctgccggcgaacagctgtcttacaacatttcacaaatggttgtcacttattttatcgccattatgggcgctcaggcgcttacaacaaaggtttatacacaaaacatcaccatgtttatcctgctgttcggaacggcgatcagccagggcacacagattttaatcggcagatatatcggcgccaaacggtttgacgacgcttatgaccgctgcatgaaaagtctgtactgggcgcttggcattgccgctttgacatccgtgatcatgaccttgttttcaaagcagctgattggaattttcacaagcagccctgacattattgcgacggcgagcatgctgatcgccatgacgatcattcttgagcccggccgttcattcaatgtcattatcatcaactcgctgcgggctgccggagatgcaaaattccccgtctacatggcgatgatttccatgtggggtatcggactgccgctctcttatctgttcggcattcatttcggattagggcttacgggcatctggatttcatttatcgcggatgaatgggtcagaggcattcttatgtacagaagatggcggtcgcggatttggattcaaaaagggattgcataaacgcccgaagcttcgttatgaagccgggcgtttttttatgcttgtgaaagccgttgtctcatgtcaccgagctctgaccggtaatgtgccagcaaaccggtaacggcgggccttgagtataacggaaacagctccagctcttcagacgcctcctcgaaatacgcctcggcctcgaatgcgatgtactcccatacattcataaaagctttgttgacggtatggctctccagctcttcttccgtatagccgaattgcttcatcacctggcgcgggagacgatttttcgcccgctcgtccgtatgggcccccagaagcacccgggtcagctgaatggctgctcctaatgaaacggctgcatggcggagtttctcttggttccggcgcgcccaaaccggcagcagcagcaggccgagggctccgcctgtttggcccgcatacatcagcaggtcatcaaactcttgataagttactttttctctgtcagagatttggccggcgataaactcacgcaacggctcttcttcaagcgcaaattgctgccgcacatcggtgagcgcctcccacaaaaagccgtcggcgcgtgtcccgttcagaaagtcttgtgccgcctgttcaaatcctccaagttcctgcacatcaagccgatcagctacgtgaaacaaagcaagcaccgcccatgcggcccgcctgttttttggcggcagggatgagaaagtccgtttatataaaggaaagtgcgcctcggcaagctgggcgcatgtttcgtattcggtcatggtatcactcctctgttttttagtgtaccatatgtttcacaataaaaagaccgatatccttcagcggaaaccggtcgcggcactgttattcttctatatcgatacggtacgcctcaaaccatgtatggatctgggcaagatgggcgatcagctgcgggcctttcatcagctggccgaaccacggaacctgaaaagatgaaccttctgtctccagcagcatttccagcttctttctgtcaagcagggtgtgaagcacggaatctttctgttgtaaaatcgttttcagccattctgtgaccccctgcgtgtatttcgggtgatgcgttttcggataagggctttttttgcggtacaaaatatcttcaggaagcagtccttcaagcgctttccgcaagatgcctttttcccggctgccatgcattttcatttcccaaggaatattccaaacgtattccacaagtctgtggtcggcgaacggcacccgtacttcaagacttgcacccatgctcatgcggtctttgcggtcgagcagatttgtcataaaccaaagcatatttaagtagaacagctgccgtctcgctttatctgttcccgtctcaccgtctaacagcggcgtttccgcaatggtttcttcatatctcgcattcacgtattctctaagattcagccgtttttgccacttttcatccaagagcgtgattctctcctcagtcgacctcatccaaggaaatccgtcttcttctgccgcggtgtgaaaccacggatatccgccgaaaatttcgtccgcacattctccggaaaggctcacgacaaaatcttttttaatttcccggcagaaccataatagcgaggaatcaacatcagccatgcccggcaggtctctgacgagaacggattcctccagatgttcaaccagctgatcctgcgtaatcacgcacttatgatgctgtgtgccgaatgcatttgtcattttatcgatccacgggccgtcatcattcggctgaaaggcgctcgctttaaaaaatttgctgttctcctcataatcaattgaataagtatgaaggggatctctgccttgtttctcaaaatgagcggcggctatcgcggttatcgcgctcgaatcaagcccccctgataaaaacgtgcaaaccggcacgtcagatacgagctggcgtgtcactgcatcctgaaataagtaccgaatgtgagccgcggtttcatcgaggctgtctgtatgcttttcgctctttacattccaataacgccatatggacaaaccgtcctttgagaaagtgaacgcatgggcgggacgcacctcgtgaattcctttaaacaccccgcagcccggagttctggacggcccgagtccgaatacttccgcaagtccgccgctgtctgtacgggctttcacatcaggatgagcaaggatggctttcaattccgacccgaacagaaaggaagagccgtgttctttataaaaaaacggtttgacgccgagccggtctcttgccccgaacagccgcttgcgcttttcatcccagatggcaaaagcgaaaataccattcaagcggtccacgcactcctcccgccactcaatatagctgtgcagcagcacttctgtatcagaggtcctctcaaaacggtggcccctcgcctgaagctccttccgcaattcctccgtgttatacagctcgccattataaatgatggtgtacgtttcctcttgatgcgtgcaggccatcggctggcggccgccttcaatgtcaacgaccgaaagtcttttatgtccgaataaaacatggggctctccccagacgtttgaatcatcaggccctcgttttgaaagagtgtctatcatattgttcataatatgtttctcttggacgagctgcttttgaaaatcgacccaacccgcaattccacacatgtgatatcagctccaatcccgtttctgtcggtatcaaattcgtttctatcagcactttacccagtttatgcaaagaaacgcagatagttgatttgtcccactaagagttgtatgagacaagcccgatttggaaagaacggaagagaagaaacaaacaaaggagaccggcacggttatgaaacgaaaacagcttttctcacaaaaaaacaaatgggggcgcggcaccctgatgatagaggacggcatctgcctcgtcgaaaacgatgaaggcgatatcctgcttgcagacagtctaggaaacgcagacgtattgatgaaacgcggcggcagatggcagccggcacggatttgcggcggtgcggccgaaatcggcgcagacaccatccccctgctcggcggggaagaaatccgttatgaaaaggcggtcaaacggccgctgttaaccttgctcgattcgctggacgatgaaacgtttctgctgtttctcagccatcttcacgggttcggcctgtctgtatatgattgcgtattttcctacaatcaggcgctgttttccggtgaaggcgtttcgttttatcacttctcggcggatgacgcacaatgcgccctgcagcatcaccgcggcagctcgggtaaacacgacagatttgaatggacggcatctgacgggcggcgctccattatgtattcagcggcaagacaagacggaaccgcgtaacaaacaggccgcaccttttaaataggtgccgcctgatgtatttagctttgtttttcacgctgattgacggccggcgtttgcttttacccttcacagccgtagcttttgcggtaacgagagtgattgacgcttttggcatcctgcaaatctccttcgcctcatcaacatccccctgtcacggcatttcccattcaggggcacagttgcgcaaaatgtatgcgcaactaaaaaaacccggatgcatccgggtttttcaagcgattgattaaaatacgtgaaagccgatcggcaagtgaaggccgagcagcaccgtcaggacgagcacgataataaaaccgatccacagtccgccggttgatttgccttttttcttacggatgacgagcatttccatcagtccgatggtaatgatgccgagcagcatttttccggcgtactcaccgttccaattcgcaaaacggacgaaaagctcagctccggtcagaataataataatgtagaataagcgcagaatcatatgcgtaatttttgcgcccttcgcttttccggaaccgtacagcccgtagctgacaaacaccaggataagcgcaacgacccatgaagtaatatgccaatgtgtcattatgttcaattccccctatcagatcaatctgcctcacttatggtaccacaacaagccgctcggagcattatcaatcgtgcgaaagacacacaattatccgatttggttcgacagcgtgccgatcggttcaattgtaatgtcaatgcggtcccccggctttaaaaatttcggcggcttaaacccttttccgacaccggacggcgtccccgtcgctataatgtcaccggcttcaagcgtcattccttttgacagcgtttcgattaattcagctatcggaaaaatcatgtcacccgttgatcctgattggcgcagttctccgttcacccgcgtttcaactttcaggctttgcggatcactgacagccgacttatgtacaatgaccgggcccatcgggcatgtcgtatccaggcttttgccgataaaaaactgtttatgtttcttctgcagatcgcgcgctgttatatcatttacaattgtatagccgaatatatgatcaagcgcatgttctttggagatgtgcgatccgctttttgatatgattaccgcaagctccccttcataatcaagctgctccgttacgtccaagtggctgtccactgtttctccgtgtcctgtaacggcagcgggggctttcgtaaaaaccatgggatgctccggtatatccgcctcactccccatttcaacggcatgatcacgataatttttcccgatgcagatcacgttctttgaaggtctcggaataggcgcacaaagctttacgtctgacagcgcatacataaatgaacccgactcgtcattcggttttttcgcccattccgcaagctgtccggcatgcgcgacaaacttatctcctttttgaatgcactcaatcagcgaacccggaatcgtctcaagttcaaacaattttttttcagccttttgcagatctaagattttgtcatcatcaatgatcagaccgacaaatgttcggctgttcagttcccctgtcgcaaatttcatgttaatcccccatcatttttaaatctggcattcctttatgtattcttcctccgggcgggaaattcctcttttaaacaggctgaaaataagtgtaaaagagtatcaaaaattgtcacttttttagtcatattgacgaaataaaaccttcttgcacaaaatgggttatactattatcatcctatgttttccaaaataatcgagaattggagatcacacgatgaacaaaattgaagaaaaaagattaactttattcgagacagcgcaaaaattcggaatcaatgcgacggagaccatcaggtgcagccaggagctggacagccttttaaacgggtgccggggcgggctcatccaacaaacgaaagacagcgggctgaacccgtccgcccagattgagcacggccgcaccgcaggaaaaaaagaggttttctcataaacgtgatatgtatataaatctgtatcatttatgtataagacccggcatgcgtaaagcgccggtgtttttacgtctaaagttttttccgctcacaaaaatgtgcatttgtcataagctattttaggcaggcagcccagataagctcctggagtgcagtcatgaaaatcttcacgaaaaggatgtgctcgtatgcccgcaattgtcggagcgtttaaaattaatgccgtcggtacgagcggagtcgttcatataggcgactgcatcaccatttctccaaaagcagaggttaagacatttgccggagcgggcagcttcaataccggagacaatctcacactgacgaattacaggaattcaacgaatgtgtacgataatgatgtaatcgatcagccgatggcaggaaacgcataaaggaggcgccgtatgaatttttacgtcaatcagtcgatccatatcaattacatgcgtgtagaatctgtcagcaattcctccatactgcaaatcggaagcgccggttcaattaaatctctttccaatctgtacaacacagggagttatgttgagccggcgccgcctgtcaccgcggggcagcaggctgtaacaacagggggaggtcccggcacctcatcatttgtaccgctccagccgccaagccggtagttttaatgaaggaaacgagacgcgaggtgaatgtcatgtatgatcaatccgtttcatcctacctgcagaatttaaattctttcgtccagcagcaggcgcagcagattcaggagctcgaacggcagctgaaagaattccaaaatgaaatttcaacgctgaaacagcagccttctacaagaatcgatcggctcgagtataaatttgatcagctgaaaattgaacggctggaaggaacgctgaatatcggattgaatccgactgatccgaatgccgtacaaaacttcgaagtcggccagacatctccgcaggtcggaatgatgcagcaggaacaggcgggccagcaaatgcagcaaatccgccaaaacgtcgatatgtacctgaatgaagaaatccccgcgcttttagagaagctcgaaactcagtatgagagcaggctggacgaaacgaacaaatatcatattattgaagatatcagaaagcagatggacagccggattcagtattatctgtcccatgtcccgaaagaagaaaacacggcgcccgcgcaatatgccgagcagattgccgaacatgtgaagcgtgatattgtcagggccgtcgagcactttattaagcacatacctggtgaaatgaaaggtgatgatccgtcatgatttttacagtgattaaccggaatattgaagtcggcgacatccggtctaccggtgtgtccagttcttccttattattaatcggcgacaccgattccgtctatctgtcttccatctttgacacgcctccggaatctcttattatcgggccttatgtgccgctggcgccggaataatgttaaagcgcatttcacgcctccggaacgccaaaatcaattcagtcgggattgcgagtgtctttcaagcaggcgatacgaatgaaatcaatatgcggatcaaagtattggccgatcagcgtactattgccttatacagagacgatgaaggctcatttaacaaaaaagaataccagatctttcggcagccggccgtcatgccgttaccggaaacgggagtccaaagcgcattctgccatgaaaacccttcaattcgggtaaggaatgtaaaagttcaaggggtatcgtcagcgtccgtggttcaaatcggatcgacgtcgattgttctgggagattcgcggctgaaacatattaggcagattgtcacaccaagctcacaatcacagcagccctgacatataatgacggtgagacttctataaagggtgtcgtttatgccagcaattaccggacctatagctatcaattccatatcgggcggagtcgtaaactttggtgattccttttacctttctccaaaaagctcttctaaatctgcgctcggttcgggagcaggcaataccggagatttcctgttattaaacaacgttgtcaatgcgacaaactatatagaccccgatgtcagcgatcaaaatgtggtaggaaacgcctaaaaagcagccgctctttcagaagagggctgcttttggttcagcgttatgttcgttcatttgctttttttgtttttacaagcttttccggcggctgttttctgatccatttcacaaaccgcgcgagtttcgggtcacgccgcagctcttctattcccgcgagccttgccgcaagctcctgattcgtatagagcgcgtgaacctgtttatgacaagggatgcagagcattgcggtcggaaggaatgtcccgccttcttccttaggcgttaagtggtgctccgtcagccgcacatgatggcggccgcataattcacatgtgccctcggtagaatcggccatgattccttctcctttctacatgatctccaatgtgacccgggtgcctttcccgcccggttcggacggatgaacgattaattttttcggcagacgcgctctcagctcctgcacatggctgatgactccgacggataagttgtccgattgcagcttttcgagcgctgtgacaacggtgtctaagagcccttggtcaagagtcccgaatccttcatctaagaaaaagaattgcagcgggtattgcccccgcagctgaatctgggcagacaaggcaagcgcaagcgacagcgatgtcagaaacgtctccccgccggaaaggcttgatacgggccgtttgacgcctccgttcgcgtcatcacgcatgacgaaaccgccttctgaatcgactaatatggcataccgctgccttgtcagcgctccgagacgggcagaggcgtcccgagccacgctttccagctgttcttccgctaaaaattcgacgaatgtattgcctttacatacagactggagcttatcaagcctgtcaatctgtgtctgccagcttttcagttcggcttcaatctctttaaagcgcttatgctgtttttgcataaccgcgaaggcttttgcctgtgctcctttttcctccatggcggcgcctgactcagcctctgcctgcttcagcaatgaaacggatgctgtccattcttcctccgatatccggcgctcggctaatttatcagtaacacggctgatatttgccgatagctgttttgaggtgtccaggaactcatcaatttcttttttcatttcctctgcacgcccttgcggaagcagactttttttgacttggtccgggtcggtaaacccggtgtcttttgacctcacgcgccagtcgttttgcgctttctcaagggaggtctcagcatccctgagtgacatgagactcccggattcccggccttttgcgtcattcagtgattgctgcgcctgcttcagcgcgtcgaatagggactgttctttcgattttaacagctgtaattcctgccgcaccgcttcaagctttgcggaaattgatgtttcttcagctgctgttccgagctcttgttcatatccgtcaatcacctgctgcaagcgctcagacgcatagtgaagctcgagccgttcccgttcaagccgatgcttcatctcctgcaggcgttctttctcctcttcatgttccttgaggaatgcgatgcttgtttcaatgcgcttctcacattcttctgcctgcctgtccttctcatctatcgaagcctgccaggcgtcaatccggtttggcggaatatcaccgcagacttcgttgtactgattcaatcggctttctgacagcgattcaagctcttctaatgaatgtctgagacggtcggcttctttttcctcgtagcggattcgttcggcaagctgctcagcttgtctcaccgtctgctgatgcgcgctgatcagtcttgtgaccttctcttttaccgacagcatatcctgtttcatttgtttccattccaagcggacggcgctgaacgcttcatcaagcgggcgtccgctgatggaagaagcggcttccagctccggaacccgggcgctttgcagaaacggacattcttcggtaaaacgccccgactgttcttctaatgcaaccttggctgtcagcacttcctgagaaagagccgccgcctcagaaagcagcgcttccacctgctgcaaatgttcctgcacagccgtatcaggcgagaatgtttcatgagcggaacgcgggcggtcatgctgcgtcgagccgcatacaggacaaggctttccttcgatcagtttttccgataattcttttgttaatgcagccgttctcgcttcctctgagcgcctgcggagatcggcctgcgttttttcagcccgttcggctgcggctttcagtgaacgctccgtttcacagaccatatggtaaacggtttgaagcgtttgataagcgcgcgtaatgtcttcctcttccgttttcgctttcgctgtgagcgactcgctttctccgttcagcttctccatgtttttcagctgcgttgtcagattggcccgttctttcgtgatttgttcctgtgtctgctgaaagcccgccgccagctgtgctgcggtctggcattttttccgttcatcggcggtcacttgaactgctttcagctcttctttcagctcattctgcctgttttggccgcgggtcaggcggtctttcactgcggccagctgtttcgagacggcttcgtattcttcctcttttttgctgtgttccgcatttgttttttccgcttcttttttcgcttcaagcagtttttgttcaatggctgaaagtctttgatacagctcttcttccttgacaagcttcggctcccgttcggccttatgggcccgccatgcttcataggcttcattttgccgggtaaatgaaacggtttccgcctctgatttccgtttggccagttcgtgttcctgttcggcgcgctgcttccggcggacggcttctgtgcagcggtctgcgtacggctcaagggcgagagctgtttccgcctctttaagacgctcagtcaaatccgtgatgtacgggcgtctttcctcaagctttttctcccggcgctcatattcatctctttctgtctgcaggttccaaatttcctggtgattctcaaaacgctcttttgcccggacccgtttcttctcagctgcttcaagccgttcgttcgcttcgtggaactgctgttcagcctgcttcagcgcatcttctcctgcgtctccgaggccggattgttcagccagcatttcattttttttcgctgccgcttcctgcgcccgccgccgcaattttttgacaagcctgtccccgtactgttccagattaaacaggcgctggagcatatgtcttctttccgcgcctttaagcgacagaaactcggcaaactttccttgcggcagcacgacggctcttgtaaagtcgtcaatggtcaggccaagaagctcttccacctttttgttcacttcattcgctttatcggccagcaccgtttgttcgtctttgatttcaatcaggcggcagagggcggtttttactttcgtttcatccgttctcttaaaaacgcgctcgaccttgtaggaaacccggtggccggattgaagcgcgaatgtaaatgagacggcgagctgatcttcggcatgattcaggatgccgtgcgtattatttgcggcgcgctccacttttccgtataaagcgagtgtcatggcatcaaggatcgacgattttccgcttccggtcggcccgaaaatcccgaacaccccggctcctgacagtccggcaaaatcaatggtctgttcctccctgaagctgtggagcccttttatcgttaacagaatcggcttcatgtcgcatcctcctcatcatctgctgacgcaagctctaaaaacagcttgaccatctcctcatccggcacgccgccgcccgtttgtttttcataaaacttcttaaatcgatcctcaattgatgtgtgtttcacttcaatccggtcattttcggtctctttttcttcaaaaaccggcctgatatggataaagccgggatgcgcctttctcagccgatgaatttcctcgagagaaagctgatccgtcaaatggatatcaagatcgatccaggcattccggtcacgcccttcatcgagccagccgtgaacttcgctcagcccctgcgctttccatttgacgagcggtttaccggaagacaggaaaatctcttcccacttcgcttctccgccgggcttcgcttctaccaccgtcaccgatttggcataaccggcttctgaaaagctgtatgcgagcggagagcctgaataacgggcagccgtcttggcgcgcttgatcgtttgcggacggtggagatggccgagagccacgtaagccgcatcagtcggcaggctgtcagcggcgaccgtgtaagcgcccccgacttcaatcggacgctctgaatcggtctgatttccccccgcgacataaatgtggctcgccgcgattttcacggcatcgttccggcacagtccgcacatgtgagcaaacgcctctctgattttgacatcgtaatgatcgcgaagaagcttttcctcaaacgtatcagaaagcacttcgtttaatctcgcctctgacggatatgccagcgcggctacggctaacagctcgtccgccgacggcacctcaatatgcacgggttctgtccgcggatagccgattaaatgaatgccgcgctcatttgttaacggagaagccgccgccagcctgtcgggattgtcatggtttccggcaatgacgacaaccgggcgctttccgccgtcagaaagcgcggaaagactttcgtaatacaattgttcagcgagcgcaggcgggttgaccgtatcaaatacatcccccgccataatgaccgcatcaatattttcttccttgacaatggtattcagctcttccaatacctcggcctgctcgctcagccggcttctgccttccagcgttttgccgaggtgccagtcagctgtatgtaaaatgcgcataccgcattcacctcactttttgatagaaaaaaagatccgctccaaaaaggagcttcggatcttgttacagtgtaagaacgtgacctccatcgaagaaatagagcgcacgccctttcactttcgtttttgtaatttgttcaaccgcttttgtatacaattcgatttgtgtttcataccttttttgcagaatcggagccgcaccttcaaatccgttccggaatttcccctctatccgatctgttttatagtccagcaaatagagaccgtccgcagtttcgtagaggcagtcaataatcccttgcacgagcagcggttcaccggccgtttcggcatccttgtacacctcacccgccggaagcgccatactgaacggcacttcccgatcaatccgcagcgccccgagaaggtctttcccgatttcagttccgaaaaactgaacaatttcttctatatcaatagcttcctgctgttcttctgtcagcagctctttttcgtaaagcatccggaccgtccgctccgcttcttcggcagtcggaacgtgcgtcagcggtatgtgctgcatcaccgtatgcatcgccgttcctttttcggcggctgtcagcccttttttcatcataaaaccgggacgcctgtataaaagcgtgtctcctgatggtttgatgagagagcggccgctgtattcatcctcgtattcttgctttctcttcagctcagaaactgactgcttcgttctgatagccgtcagctctcggtacggatattcccattcaagcagacggcgcgcctgatcatcaaatgaaaacgaatcaggaatcggctcgccctgctgaatcgctttgagacgtttgctcttttcttcagcacgttcttttggattctcttccagcaattcactttgctgcagcatccggatgtgaaaacgcgacggatcgcgcgcgatatcctcaggcgatgaaagccccggcgtcctgtgcgcctccatgtcacggtggcggatgagcgccggcccgataaagtccaaataagatgacgcctgatagcggtcgaattcagaaagaagccaatcagcccggtctgcttgcgcctgccatttggccagctgtttttcccggtttttgcaggaaccgacgagaaacagcttttccttcgctctggtcagcgccacatacaatacacgcaattcttcggataagagctctctgcgcatctttttcttcatcgccacaagcggaagagtcggatagctgattctgagttccggatgaatgtacttcgtgccgaaaccgagctctttatcaagcaggtatgatttgttgagatccatcatattaaaacttctgccgagtccggcggtgaaaacgacggggaattcaagtcctttgctgctgtggatcgtcatcagccgaacgacatcctcctgctcgctgagcgcccgggccgtccccagatcatcgccgcgctcctgcatccgttcaatgaaccgcaaaaagcggaataacccgcggaacgccgtcgcttcgtacgagcgcgcccggtcatacaagacgcgcagattggcctggcgctgctttccgccaggcatgccgcctgcatagtcaaaatatccggtatcgcggtatacttcccaaatcagctcagacaccgaatgattcgtcgaaaatgaccgccacttttgcagactgtcataaaaggttctcagtttttgatacaggtcatcatgcctgtcgccgttcgctatatatgctttaagcgcttcataaaacggcgcttttttcttttcaaggcgtatcagcgcaagttcattttcgtcacatccgacgatgggcgagcgcagcacggaagcaagcggaatatcctgatacggattatcaatcaccttcaagactgaaagcgccgcagccacctccacggcttcaaagtaacccgacgtcaaattggcgtaaaccggaatgccctggtttttcagctcttccattaattgcggagcccacggcatggagcgcagcaaaattacgatatcccggtactggatattccggtgtgtttttgttttgccgtcatataccttaaacggagatgagacaagctttcggatctccccggctatcgctttcgcttcccagtgcacggtttcaaagtcttcggcatcctcggagctgtctgcgccatcagcgctgtcaatcagcagcagttccgtttttgccgcgtcattcggcggatacgatgcaccgagcttcaatgccgcctgttcatcgtagtccacttcgccgatttttccgcccatcagctgcttaaacaagaaattcgtactgtccaaaatatcggagcggctgcggaaattttggttcagatcaattttctgccccgcgccttccccgctctctgtaaaccttttatatttcccgagaaacagcagcggctcagcaagtctgaaacggtagatcgattgtttgacgtcgcctaccataaacagatttcccgtctcttcattcccgcttttaacaagctgcaggatagactcctgcacaaggttcgtatcttgatattcatcaaccagaacttcatggaactggtcttgataataaacggccgcttcgctcggcacccgccggccttcttcatcaaccgcagttaaaatcgccaggcagtaatgttccaaatctgagaaatcaataattgatttttcttgtttcgccgcttcaaatcgtttcccatacgatatcacgagctgaacgagcgtttcgatgacaggcttcatatctgttaaactctttaagtgatcttgcggacttcttgtaaagtaatctgtctttaccttttcgatcagtttcttcgcgccgtttcgcaaatcggtcgcttcgtccaaaagcgctttgtcaaattcatcaccctttaccgccttcgcccgcttaaatgagactgcgggaacccgttcatacagcgcatcgaagtcattccggcagctgatcagctcttctatctgctgaaggtcatccaaaaaattatcagcgcgcggcgccggcccgccgggcgcttttgtcagttcaagcgccttttcaagcttttgttttgccccgaagagcgccatttcagcatcttctctcacatattggtaaaacggaagctcttccattttgctttcttccgtcacgtcatacaggcggacaaagctttgcagccacgcttccgggtcaggatgcgaccgggaatactcgtacacccgtttgacaaggtcttgaagatccagatcatgcctgtctgtcgtatacctgtccgcaagctcaaaaaacgcctgattcccttttgcgtattcatcttcaaacagctcatcaagcacttcgtctccgagcaattcgccttccgtctggtcagccatccgaaaaccggggtcaagatcaatcatataataatattttttaagcacttgcagacagaaagagtgaagcgtcgaaatgctcgcccgatttaatagagagagctgccgtctgatatgcagagatcccggatttttggcgagctctttttctaatgcttccgcgatccgatgcttcatctccgctgctgaggcgtttgtaaaggtcaccacaaggagcctgtcaacatcaaccggatcttcttccgcggttatctttctgatcatccgttccacaagcacggccgttttacctgatccggctgcggcagcgaccagaatatcgcggccggaagaaacgatggcgctccattggtcatccgtccatatgctgtctttcggtttaggaatttgcatcatcatccgcctccttcttcagccaatccagtatggtgccgtctttttccgctttcaggctgcggtattcattttccttaagcgactcatcaaactggcacaccgattgaaacgcacagtacgtacaaggcgtcttatctttcagcttatacggggtaatggacacaagcccgtccgttatcgcttcgcccgcctgttcaaatgtccgccgcacatggtctgtcagcagatgaaagtcctgttcgctgaccgcggctgagtcggatcttaaagacccgtcctttttcaaaccggcattgacgatatttgaacgcccttcctccaaggtcgtgtccatcaggctgatcgcctcccggtcaccgaggagaaggcctttcattttaaatttcttgaaaatttcctgctcgatttcatcaagccccatcggcagactggcctgaatcatcggatcatggatatggaaatacaaaacgcctgccggggtcgctttcataccgagccaatcttcggaatgtgtaatcgataagtcaaggtatgtgagcatttgcagagcgagcccgtaatacacctcagccagatcaagccctctgtcgcttgatttataatcaacgattctcagcagcaggccttttgagctttccgctttatccacgcggtcgatccgtccgacgagttccattgtacagccgtttttcagcgtgaaagtgagcgggggcagcggcccgcttccgccgaaaccgagttcaagaccgaccgggacgaaaccgctcgccttcgcatgctcgcttaatatgcctgaaacacgcgtgacgatcttctgcagtttttccttcacataaaagtgtctgtttgagctgagcagaatctctttttgcagctttggcgcaagccgttccaccgcttcataggagaaattccggcactgatctttcgtcagatcgcgccattccagcttctgctcacgaagccggtctgaaatcagcttcaggctggagtgaaacagctggccgatatccggcgcttccagcttgaaaaactgccgctcttttaattgaagcccgtgagatgcaaaatgagagaactggcaggcattaaacgcctccatccgtgagacgcttcctttaatatgctcgccgtaaagctggcgcgaaacaggccgttcaagacgcttcgcctcattgcggaaaaacaagcttgaaaacagctttttcgcacgccggtgatcagactctttcatcagcacattgtatgcgctccaccatacgtcactgatctcgtactctcttgtccacagcctgagctgacttgccgtatatgtctgagccacctgtttattgacgagatactgaagctgctcttcttcgcttacctgctcgggatcagccgctgacagcttttcctgatgatcgggaaacagctcgccaagcctgtttacaacgattgacggcaggagcgtttttccttccgcatcggcaatcgggtatgacacataaagacggtcagacggactcgacagcgccatatagatgagaaaatgctcatcaagcagccgctcacgccccacggaagacaactccactccgaccgctttcagccactcccggtcatcatcagacagcacgccgttttcatctgggcgcgccggaagaacaccgtcattggctccgatgacgaatgtgcaggacgtgccgtacattcttgagagatccatattccctacaaatacttggtcaagcgcaggcggaattaaagaaaaatgaagcgattccgttcccgtttcaagcatttgctggaacagcgccaatgatatttcatcttcacccatcatgccggcaaactcctcgagaagctggataacggcatcccacgcctggccgtgctgctgcgcttcgatcatgtttccggcctcttcggcccgctgccttttccggtccagcttcaggggaacatcggtatcttccaaaaagagataaagagcctccgccatgctttgaaccgttttcgcttttttcatccggttttgaagccggacaaggggcgcggctatccactctctcgtctcattcagcatgtgttccatctctatttcctgatccgtctgcgcgaaatcctcatcgagcgatacgaagcgcctgtatacaaaccgctcgccgctcgtccagcgctcccctttaacgccgtaggcgatacagtaattttcaagctgatcgacctgctctcttattttctgctccggctgatcaagcgggaataacagttcggttttcgcacagcggaacactgcttcatatctccagttccccttcacgacatcgaggcttgaacggatgaattcaataagcgggtgatgctgcatagaagcttttccgtcaataaaataaggaagcccgtaatcggcaaacacttccttcagcaaatctttataatcttccggctgacggatgagaatcgccatatctttgtaccgatatcctccgtcccggacaagcgattgaatttcccgggcaataccttcaagctcagctcttctgttttgcgcctgcatgacggtaaaagcttcctgtccgccggtatacgccgcggcgggacgcacatcgtactgcgactctatacaggcaagctccggcgcatgctgatgccgcttcgtgccatgcagttccttgcaggaaatatcagcattcaattcctttgccgtctgataaagcttatagtatgtgcttcccgtcattctgaacagatcgagctcatccggtgcctgttccgccgaagggctgtgcgccgtcagcgagaatgtgacatgttcagcatgcatgatcagctgctccagcacccttaattcctgcggcgtaaattgatagaatccgtcgacgtaaacacgggcgccttttacaacgtccgccaaaggaatctgctgagcgagcagcgtcaaatagtcctctgaatgcaaatagtgtccggcgaggcttctttccatctgctgatataaaatgcctaaatcatgaagtttttcagacagcatccgctctccgcgatattctgacgccgttccgctttccgccatgcggcggacgtcttcaggctcaatacagtaccgcttaaactctgtcagcatccgttccacctgctcagtgaacccggttttgtcactcgctttttgatacactttaaactcgtgcttatattcttcaatcagtttccttaaaagcatctgcacacccgtcgtcgtcacaaacgggcggttcatgcccccggtatgctgaagcacgcgccacgccaaacgcgaaaaactgaacacttgagcgcgtatcatgccgccgatatccggcgttttagcaagctcatattccattaaaaacgtcatttgatccgggactagaaaaatgatcggtttcccgaacggctcccggcgcagttcatcttgaatgctgtcgataatcagcctcgttttcccactccccgatctgcctactaaaaactcaacacccaaattaaaagacccctctctttttatctttctacattttatcgaaagttgacgaaaatgaccaatctcatctgctggtaaaaacgggatgactgttttaaaaaatttcgtttttgaccaaaataaagaaaaaaggactaatgatgatgtcagaatatcccgaagtaattgtacggacggctctgtcgttcagcattctgtttatcggcgcccggatactcggtaaacaaaccatttcacagatgacgctttttgatttcattgcggccatctcgctcggcgccatcacggcaaatctgtcgtttaatacaaagctgccgattcattataatgtcattgcctacattattttcgtggcaatcatttaccttgtcgcatatctttctatgaaaaacagggttcttaggggtttctttgcaggcaaaccgaccattatcattcaaaacggtaaaatacttgagcataatatgaaaacgatgcgttataccatcgactacttgaaccagcagctgcgtgtaaatgacgtatttgacatttctcaggttcagactgccatcattgaaacaaacggcagcatgtcagtggaggtcaaaccggaatttgcgcccgttacaagacaggatctcggcatctttgccggacatgaaaagaactttgccgttgagctgattatggacggccggctggtggtgaaaaacctggaggaaaaccacgtatcggaaaaatggctgagagaagaattggacaagagaaacctcaaaccggaagacgtcgtatacgctgttcgcggaagcaacggtcggctttttgtcgacacatacgacgaccatattacatcgccgctagatcaagaataaaaatgacatccgcacatgtcacgggctgccgccgtataataccctataaacatccgggggtgagtccaatgcacgagaatttttttcattatacagccatctgcagtgacgattctgtgcttatcaaggatcttgtaaaatccataaacggtgaatacagcgctgtgatttgctactcaatattagccgaaaaagcgccgaccgcagaaatcagaagacgaatcgaacatatcagagaagaagaagtgcgccacctgcacgctttttcttctctgtatacgtcaattaccggaaaacagttgacgccgaaacagacggagcattgtccgcacacatacagagaaggactgagggcggcgttttatgatgagcagaaaacgaatgatttttatttgcaggcatccgatagagcagtgcatccggaagcgaagcggttatttgcccgcacggcatttgacgagcagcgtcacgccgtctggtttttatacgatatggcccactctcctttccaccatacagggggaacggtatcaaacgcgccgaatacaagctacaccgaggtaaataccggaaaataacggttcaggcagatcacgctcccccgccgggagtcttcagaccgcagacaaaccccgttctttcaaaatgagagaatggggtttacttttcgagccgtttttatactccctccaaacaatggataacttcttcattgtataatcagcaaaaaccctttataataaaataaaccaaccggtcggtttttaaggagccgaacctcatttggcggaaaggatctgtgtgaagtgacaaatacaaaaggcggtgccggaaagagcgaaaagacgaagaacaggctcgtatccgcttcgcgtgacttatttgcaaaaaaaggatattcagaaacatcgattcgggatattttagaggcggccgagatcagtaaaggcaatctatatcaccattttaaaggaaaagagtttctgtttcttcatatcatggaagaggatcaccgcgtgatgatcgagacgtggagggaaatggaagctgatctgaaagatgctgccgaaaagctgacgggctttgcggagctgctcagccggatgagcatcaattacccgcttatgagagcaagcgaagagttttatgcgagtgcgtttacgtcagaggaggtcgtaaagcggctcaacaaaattgatattgaatatgacgatgcgatgagagagatcttagaagaaggaaatcaagacggcagctggtccattcatcatgtcgaatcaaaagtgaaaatcctgctgtccgtcttttacggtttagatgtgttatataaaaacgataccattcagcaaagaatcgaattgcaaaaagaagccatctccgtgtttattcacggagtcatcaatgctgatcaacagaatcaagacagctgacaaaggagaaacaacatgcaaaaaccgatcagagaacaaaaggctgtactcatcatcttattaagcaacatatttattgcgtttttaggcatcggattgatcattcccgttatgccgctgtttatgaatgtgatgcacttgacgggcagcacaatgggataccttgtcgctgccttcgccgtcgcgcaattaattgcatctcccattgcggggagatgggttgaccgcttcggcagaaaaatcatgattctcgtcggactgtttttattcgcattatccgaactgaccttcggattgggcacacatgtctccattttatatttcgcaagggtgctggggggcatcagtgccgcttttatcatgcccgctgttacagcgtatgtcgcagatattacgacggtgcaggaaagatcgaaggcgatgggctatgtatctgccgccatcagcacagggtttatcatcgggcccggcataggaggatttattgccgatcacggcgttcgtatgccgtttttctttgcggcgggaattgcatttatcgcagtgatttcctctgtctttatgctgaaagagccgttaactaaagaagaacgcgcaaagcagctggaaagcgtcaaagaatcaaccttcttaaaagatttgaaaaagtcgattcatccaaactacttgatcgcctttatcatcgtttttgttttggcattcggactgtcggcgtacgaaacggtattcagcttatttacaaaccataaattcggcttcacaccaaaggatatcgccattattattacgttcagctccattgtggcggtcctcattcaagtgctcgcgttcggcagacttgtcaacttcctcggggagaaaaaagtcatccagctttgtctggtcatcggcgctgtgctggctttcgtttctacggtgatgtcaggatttttgcccgtgctcgctgtcacttgcatcattttccttgcgtttgatttactgcgcccggcactgactacttatctatcgaaaatcgcaggaaaccagcaagggtttgttgctggtatgaactcaacatacacgagtttgggcaccattttcggcccggctctgggcggtattttatttgatatgaatattcatttcccgtttctgttcgcaggtgtggtcttatttctcggtctgggattgacctttatgtggaaaggaaaagcgggcgaggtttcggagtagggtgcactcaccatctccggagctttttttatgtttgtgataagaaaaatgaatggattatgagaaataattcattatttatttatctcaaaatctatactatagtaatagtaaggttaacgagcttaacaatttaatatgaatgtttcaggaagaagggttttcattgaagaaagacaaacatctccttacggatatctggtttattctcatcagtgcggcaggggggtttcttctttcgcttacagggatgtcgatcgcctggatgctcggaacgctggccgccggctgcatcctctccatgacgaggccccgctggctgttcatggcgcctgacagaagagggattcaccgcagatggcttgcggcgggacaaatgatcctcggcatcgaactcggccagaaactgaacctgtccgttctgtcggttttacgggagcattggcttccggtaggcttcatgctgattttctctatcgtgatggcgcttgtttccggatatgtgctctttcggttcagccggacggacatgatgacaagctttgtaggcacggcgccgggcggtttatccgccatgccgggtatcgcccaggaagtcggcgcaaacaccgcgattgtaagccttattcagctgacgcgcgtccttttggtcgtcatgacaataccgtttctcgtcattttcttatttaccaaacaaaacggtgcggctcagacatcagccggagccgtttcagcaggagcttcacatccgggccttactcccgtcttgttaacagccggatttattttggctgcctggcttgcaagcaaaggcgcaaaacggctgaaattccccgccccttggctgctcggcagcatgatcggcgttgctgctgcggaaatcggcgtgtccgccttggcgggcaaagacatgctggcctggtggccgccggaagcaaaccagctgtcacaaatttttctcggcgccacaatcggatcaaaaatgtacaaaagcatgttcaccggcgtgacgagagtgctgaccgtcggatttatttcatccgtcggattaatcgccgccatgattctgagcgcggttgcggtttctaaattaacgggcatctccatgattacatctgttctcgccttttctcccggcgggatcgccgagatggcggcgacttcgatcaccctgcacgaagactcgactttcgtcgtcgcggttcaggtcatccggatcgttctcgtcatcgccatgcttccgcccttctatcggctgctgcaccacctttctcagctgaaacgggcacacggcgaaagaggccgggcagaaagaggaacatgatccgaataaaaaacacgcatattgatgcgtgttttttatttgaacagctctccgccgccatttacagaccgccagtttgctgaaagatcacggaacagccgttcagcaaataacagttcttcatctgtatagcggtctaaaaacgccaagagccgcttttttatcaattcatgatattcatgatgaagggaatgcagctctttcccggcaggagtcagccggaaatagacttcttttttattgtcgctcagccgggtcctgcgcagaaagccggcttccaaaaacttcgcgcagcttctcgacacggtcggctttgtcgtcttcattttttccgctattgacgtgacattgatcggttcatgatctccgatacacgacaaaatgtgaatttccgtcaaggtcagctgtaattttttcccgttttcttcacggagttcgtccatccgtccggccaacgacgccctgatgtcctcctgacacctctcctgctcgtgaaaaatatctgtcagcctttcaagaatcatgtgttttgcatggtctggctgtcttctgtccaactgctgagtcacccttccgtattgattgtttcttttactataacgttttgttacataagaaacaatcacacaggcgcataaaagggtatcagatgaacccccatctctccaaaccggccagaacggcttcttccgcttcacgtcccgcgccgccggctgcccatgccgcgtggccgtccggccggattaaaacggtgtggacgtcatcccaatcggcacgtgtttcagcaagctccgccttgacagctgccacactgtccgtatcaataccggcgggaatgctccctcttaatgacagaagcacaaaggcgcccttatgaagaaaatcatacagccgggccggccgcccgtcatgaagggtcaattcgatatccggcagacgttttccgttcagggtatgcggcggcagctccgcatccggttcataatgcagatcaagcgcggatacttttcccgccaataaacggttggactcctgaaaatccagcaaagcggtcatcgtttctcttaatgccatccccgactcggtaaaatccatgagctttatctgcgttttgatattgtgcaacacttcttttcctgtgctgtgcctttcctgatgatagctgtccagaaggtgaggcaccgctttccccttcatttgcgctgccagcttccagccgaggttgaaggcatcctgaagccccgtgttcaggccttggccgcctgcgggaaaatgaatgtgcgccgcatccccggccacaaaaacccggccggagcggtactgctcagcctgacgctcggcattgccgaaccgcgacatccataccggatcactcactccgaaatcagtgccgcatatccgccgcagatcttctttcagctcattttcggtgaccggctcttccttccgcttttgcggggcatgcggagaaacgatgaggacgcggaaaagtccgtccgtaagagggacaatcacaaccgatccctccaggcggcacgttgaaaaaaaggaagattcgggcggatgtttcaaaacggcatcacagagggctcctgttaagtcggcatcagtgcccgaaaaagcgatgcccgcctgtttccggacaatgctccccgctccgtctgtacccgcggcatataagctgtgaagagtgcggataccgctttcgtcccggaacaccgtctccactccgtcatccgtctgggtgacagccaccgcttccgccccgcggatgatgtctgcgccgagacttgatgcatactcctccaaaatccgctccgtttctgcctgaggcagcattaacgaataattctgcttcgtatccagccgagaaaaatccagccgtgtatccagcatggaaaaatggccggaagacaccttcgtccctttttccaaaaagcgttccagtatgcctctcatggcaaaaagctcaagtgtgcgcggatgcatgataagcgctttggaatatggcaccgtcttcttcaatcgttcaatgacagtcgttttcactccggccagcgccagttctgatgcaagcataagcccgaccggacctcccccgataatggcagcctgtgttttcatctcatcagccccctttcatatttttgttacacacgtaacaaaatcactaaaaaataaacgcctctttttttgtttcacgcgtaacaattttcattatagtctttcctctgcttttttacaatcatttccgaaaaaaaagacgccgttcacttggcgtctgattcactgatgactccgacaatatctttatccttaatcggaccgaaatgacggctgtcgaggctgtatatgcggttgtcgccaataacaaagtattgtcccttcggtatgcttttgcgcccggtcgtttccttcagcgtataatcaccggtcacatggctcccggcggacaatgatgactttaacggttttaaaaagggttccgccacccgttttccattcacatacagctgatcctccctgtatgcgattgactcgccggggagcccgataactcgtttgatcagcactttgcggtgcgggcctttaaacaggacaatatcgaaacggcggatcgttttgtaacgatgggaaaacttgttgaccagcagctcatttccttgtttaaaggtcggattcatgctgattccttcgactttataatcaataaaaatggcattctttaattgtatggccaaaacaacgataagcacgccggctataaaccaaaatcgttttttcaagattcctgtctccctccgtctttctcatgctgactgattctcgtctgtaaacgccgttcgatatgctttccggcataccacagcaccgcgatcaccgttatggcgcccgccatcctgaaaggctgtgtcatgagtgcgtgaagatcatacccgataaagctgatcataaagatcatgaccattttccccatagcggctgctgatataaactgcagcgcccccacccgtgacagaccggcaacgatatgaaccgcagcggacggcgtaaaggggaagcaaagtaaaataaacagcggaccgaaaccgtgccgctcaacccagagcatcatccgccttatggtctgatgcctgcggatgaaaccgaaagctcttttctgtccgaaacggcggacggcataaaacatcagcatcgatcctgccgcagacccgagccatgacagaaaaaaaccttcccacaaaccaaatgcattcgtattcgccactacaaatacaacgagcggcaaaaacggaagaaacgcttcaataaaaggcagtacagccgcagccgccgggccgaaagctctatagctttggaaccattccgtcagctgttcctcagtcaaatatgataaaaattgctccaacgtttatactccttaacgagtttgtctatccttattctacacattatctccaaaaaacgaaaatgtttacgagattttccgacttgaaatatcgtgtaatcgaatataaaataggaacaaacgttctcttttttaagaaagaaggagtatttatgcctgacatccggagcggcacccgcgatctcatcgaaaaagggctgtttctgcccatggcggctgccatcctgaaccgggacctcgaagcgcttgattcgtgcccgttcaaattaaaacaaccctataaacagcttatcggctgctctttaaaattagcacaaaaggatttgagtgatgttcgaaaagagttaagaaagcgtaaaattaaaatatacgaagcggaaagagacgaagcatttacgctttatatatgcaccattaacggctatgaagaaaaacaccgttatttcaacccgagaatacgggaacaggtaaccgccttattggaatactacctgtctcttgcgaccatttaaaaagcagccgggactgcttttccttttcagtcgataaatttcagactattcacactatacattcgacatgattttctttataatcgggacacgctgttttcaatgaaaaggaggaatgttatgaaactgattcatgttctcgccgccctgccctttttcggaattctcgccggcattccatttgccaaccgggtgacgccttatgttttcggaatgcctttcattctcgcgtatgtcgtcatctgggcggtgctgacttccgtactgatggccgccgtttacaaattggacaaagaaaacaaggcgggtgaggcggaatgaacgcagcatttcccgtaatggccgccgtgctcctgttttgtgtatatctcggaatccgggcccgaaaaggaaaaaatatggaccttgaacaatggacggtgggcggacgcggcttcggcacgatgtttgtctttttattaatggcgggagaaatatacacgacctttacattcctcggcggaagcggatgggcttacggaaaaggaggccccgccttttatattatcgcgtacggctgccttgcctacattttgtcatattggcttctgccagcggtgtggacttacgccaaacaacacaaactgatgtcgcaatcagattttttcatttcaaaatacaacagcccgctcctcggcattctcgtatcgctcgtcggcatcgcatccctcatcccctatctcgtcctgcagctgaaaggactcggattaattgtttcagcaacgtcatacggacagattccgccctcagccgctgtctggatcggcgctgtctccatcacgatttatgtgatgatatcaggaatccacggttcagcgtggatatcagtcgttaaagatatcatgattttaggcatcgtcctgtatttaggcatttatttgcccattcattactatggcgggtttacggagatgttcaaacaaattgacgccgcaaaacccggttttctcacgctgccggaaaccggacagagcgtttcctggttcagctcaacggttttgctgaccgccctcggcttttatatgtggccccatacatttgccgcttcctattcggcggagcatccgcgggtgtttcggaaaaacgcaatcatcatgcctctttatcagctcgtcctgctgtttgtcatctttaccggatttgcggcgattctgcaggtgcccggtttaaaaggggccgacacggatctcgccttattaaagctgtctgtgaaaacctttgatccctggtttgtcggactgatcggatcggcgggcattctgacggcgcttgtacccggttcaatgatattaatggcctcaagcacgctgttcgccaaaaatgtgtacaaagccattctgcccggcacgactgacaaaaaagtctcacggctcgcaaaatacgccgtacccgtcatcgcgctgatatccgtatattttacgctgaaaggcggaaataccatcgtcaccttgcttttaatgggctacagccttgtcacccagcttttccccgccctcttattcagcctgccgaagcggcgtttcatcacaagccacggcgcttttgccggcataacggccggggtcggaacggtggccttcattacgctgaccgaatcaaccatcggaaccctctttccgtttcttccgcagatcgttaaggatatgaatacaggcatcatcgcactggttctgaacattgccgtcatgtttgcagtcagcgccgcagtcagaaaaaaacaaatcggcgcaaccgaaaaggcggcttaaatggtaagatagcggtaagatacacgaaaggagaaaaacgcatgatcatgacaacgaccgaaaccgtcgccggaaaacagattacagaagtgaaaggcttggtaacaagcagtatcgtccagtccagacacatcggcaaagacttgcttgcaggcttaaaatctgtcgtcggcggcgaattgaaaagctatactgaaatgctggaagactccaaaaaagcggtgaaagagcggctgatcagagaggcggagcagctcggagcgaacgccatcgtcggcctgcggttcgaactgaccgcaggacagaacacatccgaattaatcggatacggaaccgccgtcaccgccgaatccatttaaaaaaacaagcctctttaaagaggcttgtttttttatttctcacatgcgatatagtctttatctcggtcaagtcttttatttgcattgtaaagcgcttttgatacatacggcttgtactttgttctgccgcccttgtttttcactttcgacgatttggccacgccgcccttatacaccttattcagcgccttgcagttttgatacgtttttacctttgttttcgcttctgccgtctgccccgctccgtatgaacaaccgaacaccagaccgaaagacaaaagcacagctgccgtctttttcatttctatcctatcccctttcctgaatcatgctgtattgctgaacatatcatagttcaaataatctccatttacaagataaataggaaaatagttttaatttacgtccgcccgtatatcttttatggaatttttcccaaaaccttttataatatgaattgatagcgctatttgactatgatgataggaggagaaatgatgatgaaaaaagggcttcttgcgggtgttctcacttcagccgttctattcggcgcatgtacggcggatattccggggttgatcagtcccaatacggcggaagcggcgtcccagctcagcaaaggaatcggcggaagggcctacctgaacagcacgggctcagttctcgtcacgaaaattcagcttccaagctcgattcaggtgtcaaatgggacagcctatatttactcaggatttaccggaggcacagaggctgatatcggacttcagtacagtgacacctatcatgtatggaaaccgatcatgaaagtcggttcaaagggacaaggccaggtccggtatctggaaggagaaagccaattcacctatacgaaaggcttccggcccggcagcaccgtacagctgaccatttacaaaaatctgaacggcaatacccgcgccacatattggggcacgaataatgacggatacaccggccgcatcatctcagaactcgcccaaacaaatgtaggctctgtttcaaaatggaaagcgctcgccaccgtcgcggtcacatcagaggatcagcgcccttacatcaaatcaaacttctcaacagcctttacgaacatcacgatcgacaataaagcagtcacacctgtgattgatacacaggattttgccaaattgacagtgtcaggcagcagcgtcagcatgtctgtcgtcaaataaagaatgttgaacgcacgatttctgacatcgtgcgtttcgtgagggtctgccggatacgcaaatcccttattttccggatgacgtttaataaacaaacactgttacattcaaaatgtcgatttctatataacaattagaggaacctcatttgctgaggttccccgttattttccaactcacgcaccggttaacttcacatactgtcagccggctcagggctgtccaattttagttagaatatagctttaacaggtcttgtgccggaaaacgatctgcatcgttcgcctcaacaaaatatgccaactgccatttttgtgtttcgatagcttgtttgctagtgggattttcccattcagggtaaactctaattgccatttttccttttgcagcggctgttttaaggatattttgctttacaagaacttcttttggaaaaacaaattgtccaaaatgatgattactggcaaaagtattgataaccaataaatcagcagctttttcatatgaaaaggcttggtttttaccatctccgtctttttcccaaaaagcaacaaactgtcctaccttgtttggcgttatttttgcgactctgaatcgaactgatgttgaattcagttgaaacataccggccccatactctgagttttgagcttcttcttgaatatcatgtatcgttaagtgatttggttcataaaaaactttatttacatatgttaacgccttataaaattcattcactgctttcgtactccttattttttatagtacgtcatccattgcttcttgattaaaatgggctgatcatgtgtttccaataaaaaaacagccctcctcagggttgtttttttaacatttctttcattatttccgccaaaatactgagcagtccgccttatcctgaatattgaattgaatcatgcgttcaagcagctcataatgcaccggttcagtccattgaattctgaacaaacgggaagtggcgctgtagccggcacgggcaatctcgtcggcaaaatgcgcaattcccgcttcttcgggggaaacacttacatgatgctttgctgccgcaaagccgataataaaggtgccgtgatcggtaaacattggcgtgttccacttgatctgcgcttctaagttcggaaattggtcagccgtccacgagaggatttcctccattcgcagacgatgatcagggctgtcgatacttgataaatagtctttgaaaacgtccatgtcttcctccttcaacatcacgtccgctagcgccaaaaccccggattttcagctttttccttgatgttaaattcgatgatcttctttagcagatcatagtgcaccggatcagtccatcgaattctgaacaggcgcgaagaagcgctgtacccggcttgagcgatgtcatcggcaaaatgctccatcgtctctttttcaggtaaaatgctcaaatgattttttgccgcagcaaacataatgatataggtgccgtgatcggtaaatgtcggtttgttccacttgatctgcgcttctaagttcggaaattggccagccgtccacgacaaaatttcctctgctttgagacggtgatccgggttatcgattcctgatacatattttgcaaacacatccatgcccatctctcctaaaatgaaatatcattactctttacatcatcatagccaacagacggacacgatacaactctgcccgggcatgtaaatcgaaaaaagccctccccaaaaggagaggacccgtcccttcacatcacagctttctctaatatctctcccccagctcccgcaaaataaagtcgtagatcattcttgtccgctcttctttcggatacagcatgaattcctgccgcttcgggatatgactgcccatcctgtcctgaaaagtggttctgagataggcggttctgtaaacctgattttcaaaagaatgataggatacttccagttccatcgttttgccgtttgagaacgtgaccgctgtgtcatcaaatgccgtcggttgaaaatctttaacgtgcacatgcgatatccagccgcattgaggccttgcagaagaaagtgtagggaataaaaagatgtgatttgaagggtccaccataatcggcggcttgtgagatattttaatcgcttcatatgttcccgcttttctcccggcatagctggagccaaagtagcggcagcttctgtcgatgatgtgaatcggcttcatgctgacatacagaatgcagtctttttcaatgaccttcgaccccattttaccgtctatttcctcaggcaaaacagcgatggttgaacgatttacttcatagctttctaagggtgcgtgtgttttctggcacatgatgtgcagcctccaatccttttcttgaaaatttatactaataatctatcatctgtcattgaaaaacgacaggttttttttgaatatagctaaaaatcaccttttaaagatgtaatttagtcttaaattactatttaaatattatttttctttttcatttcacctcatttatacaacgatcattttcgttttttcgtcaatttgcaggatatgtcgatatatttccaagtattagttgtctaaagattataaaaattaattgatttttccggccgttatccatatactataaaaaaggcattggggggattctttatgaaagagaaaaagtcgtacactgagctcatgaagtcccgcaacacgcaaaaagcaaacgaattcgatgtgacaatggccgatatttacattcaaatggtgcttgatgaatccttgtataaacgccggatcgccatactgacaatgcagattaataaggcgcttgatgataaaaataaagaagcgttcctcacgctttcaaaagaatatgcagcactcaaacagagtgaataagccaatccatatggattggctttttttacattatccgttcacgatggtgccgccgttcacatgaatcgtctgtcccgtgacataggaagaatcatcgcttgctaagtacaaatagctcggcgccacttcaacaggctctcccgggcgctgcatcggcacgtctgagccgaagacttccacttccttcgccgagaagctcgccgggatcagcggcgtccagatcggccccggcgccactgcgtttaccctgatgccctgagtgacaagagattgggaaagagatcttgtaaacgtgacgatcgccccttttgtcgctgaatagtcaatcaatgttttgtggcctttataggcggtaatggaagccgtattaatgattgaacttccttttttcaggtgagggagcgcggctttcgttaagtaaaacattgaaaaaatattcgtctgaaacgttctgatgagctggtggctcgtgattttctcaatccccggctgtacgtgctgctcacccgcgttgttgaccaggatgtcaatggaaggaaaggcttggcccgcctggcggatgacatcgttgcaaaaggcttcgtcgccgacatcccctgcgatcagcagacacttcgccccctctttttctacatattgcttcgtctcttcagcatcctgatgctcatcaaagtaaacgatgaccacattagcgccttccttcgcgaataaaacggatacggcgcggccgatcccgctgtctccgcccgtgatgatcgccgttttaccttcaagttttttcgccgctttcggtttgtcaaaaacggggcgcgggtccattacatattcaaagcccggctgccggttttgatgctgcggcggcaaggttttcttcttctggttagccattttgatcactcctttacattaattactatattatgagtaatttgagcatcttatacgaatttcatgtatgaatagagtcttattggaaaaattaagaatatacaacagaggaggtaaatctgaattgactactttttcaaacgaggaaccggcttcctattggaaagcaacagctgacattccttcctttcccgccctcactgaagatacggaatgtgacgttgcggttatcggcggaggaattacgggcctgacaacggcatacgaactgacgaaaagaggtttccgtgtcgctgtcattgaagcagaccggattttaaacgggacgaccgcgggcacgaccgcaaaaatcaccgcccagcatgatttcatctatgccgatcttattcagcagatcggcctgaccagcgcaaggctgtatttcgaagcccatctccgcgccatggaagacatgaagcagattatgcaggacctttcgattgaatgcagactggctgaacaagacgcatatctttacaccaatacagaatcaggcgccaaaaaaatccgcagcgagcaggaagcttataccaagctcggcattgaacacgagcttgtgaaagaacttcccgtccccgttgattgcaggctcggtctcgccatgaagaatcaggcgcaattccatccgcttttatatggtgcggcgctcgtcaaagagatcgttaaaaacggggcgcggatttttgaacagacggctgcgatcgacataaaaaaagaaccgcagccggaagtggtcacgaaaaacagacacggcatcaagtgcagctacatcgtctgctcttcccactttcctttttatgacggaggggggctttacgccgccagaatgtatgccagcaggtcctacgtactcgcggtaaaaccgaaacaagcgtatccggacgggatgtatctcagcatagacaagccgtccagatcactgcgatacaccgatttgaacggtgaaaaactggttcttgtcggcggcgaaagccacaaaacaggccaaggaaaagaaatgtccgagcattacgaagcgctgaaacaatttgcggaaaacacaatcggggttgaaagcatcccatatcattggtctgcacaagaccttgtcaccattgacaaaattccgttcatcggtcccatctcaggcgatgaagaacatattttggcggcgaccggttttaaaaaatggggcatgacaagctcagcgctcaccgcgaagcttttggctgatcatattcaaaacaaaaagaacccgttttccggcctgtttattccgtcacgcttccacgcagatccgggactgaaaaaactgatttcttataatgccgacgtggccaaacaccttatctcaggcaaacttgagaggccggacgcttcacctgagactcttcggcccggggagggaaaaatcgtaacggtaaacggcaaacgggccggcgcctataaagatgaaaaaggctgtctgcatcttgtcgatacgacatgcacccatttaggctgtgaggttgaatggaatgacggcgaacggacgtgggactgtccttgtcacgggtcccggttcacacccgacggcgcggttgccgaaggtcccgccatcaagccgctgaaacgcctcagccaagattgactaaaccattctgtacgaatggttttatttttttctgcattaaaatatttttatcagattccttcattcaagttccttccataccgataaaaagaaaaagagaatatctgggggaacttatattgttatttaaaaaagaccgcaaaaaagaaacagcttatttttcagaagccgatggaaaaaaacgcatcgcgctttcaaatcaatatgcagatgtccaaaaacagctgaaaatggtcaggctcggaaacgaagaacttcatgtgcttgaagagctgcagccgttaattaaagaacatatctcaacaatcgtcgattccttttaccgaaatctggatcacgaaaaatcattaatgacgatcattaacgaccacagcacggtcgagcgcctgaaaaaaacattacggcgtcatatccatgagatgtttgccggcacgattgatgatgaattcattgaaaaaagacagcgcatcgcttccatccacttgcggatcggccttgaaccgaaatggtatatgggagcgtttcaggatctgcttctgtcgatgatgaacatatatgaagcagcaatcccggatttgcatgagcttttaaaagcgatcaaagcgacgacgaaaatattgaatcttgaacagcagctcgtccttgaagcattccagagcgaatataactgccagcgtgacgaacaagaggaaaagaaagcccgtcttcatcaaaaaatccaggaaacatccggatcactcgctgatttgttttctgaaacgagcagagccgtgcaggagctggtcgataaatccgagggcatttccgaggcgtcaaaagccggcaccgtcacttccgtacatgtcgaagaaaaatcaatcggcggaaaaaaagagcttgaaagccagcagaagcagatgaataaaatcgacgccagccttctgcagattgaagaagaaatggacaagctgaatgacatcgcccagcagatcgaaaaaatcttcggcatcgtgacggggatcgccgagcaaacgaatctcctgtcactcaacgcttcaatagaatccgcgagagccggtgagcacggcaaagggttcgccgttgtggcgacggaggtaagaaagctttcagaggatacgaaaaaaaccgtttccaccgtatcagagctcgtgaacaataccaatacacaaatcgacatcgtgtccaagcatattaaagatgtaaacggacttgtaagtgaaacgaaagaaaaaatggcgcagatcaaccgtctgtttgatgacatcgtccaaagcatgaaaacgagcaaagaccagacaggcaaaatcgacgttgatttgcaggcctttctcggcggccttcaagaagtcagccgcgccgtttcccacgttacatcatccgttgattcacttgttatccttacagaagaataaagataaaccgaccggcctttttcaaaaagggccggtctttttaatgttaacttaaaatataatagagttgacatatataaagactcgctttattgtataaacatattttgataagctggaggaatacataatgaaattgacagaaatgatgcatattgccgtgtttaccgccattatgggacttttggggatgctcccgccgcttttcttatcctttacgccggttccgattacacttcagacgatcggtgtgctcttatcgggaagcatcctaaaaccgaaagcggcgtttttaagccaattgctgtttttgctgattgtggcatgcggagcgcctctcctttcaggcggcagaggcgggttcggggtttttttcgggccgagcgccggatatctcatcgcatatccgctggcggcattactgctgagcctcagcatccaaggccttcgctcagctgctgtcccccatttgtttatcagacagttcttgttcggcgtgctgtttttgtatgtcatcggcattcccgttcaggcttttataatgcacattgatatcttgactgccgtaaagctcagcctcatctatgtgcccggagatctgcttaaagcggccgcagcctcattcgcagccgtaagaatcagaaaaactcttcaagcaagccggcttttgccgacgaaaggaagctgattttagtcatcatgattacatcatcatattcagatacagccggacaagcgccggaacagatcgcaattcagacagaaacagaacagatcacctatcaaacttggaacaggctagtaaaccaaaccgcaaactggcttggcagcctttcaggaaagccggaaaacattgcaatattactggcgaacggcatcccttttttacaacttttcgcaggggcggcgcatgccggctgcacggcggttccgttagatccccgctcggcagcggcggaactcgcggatcagctgaacatcagcaaaaccgacctcgtcatctgtgaccgccggctgagcggcagactggacgacgtcaaaacgcctgtcatcctgtgggatgaatgcaggcctttgatcgaggcggaaaaaacggaaggcgctttgatcaaaaacgccggcctgcccttttataccgggttcacctcaggatcgaccggtaagccgaaagctttcacccgctctcaccgttcgtggctggagagcttttcttgtacgaaacgtgaattcggcatttcccctgatgacaaagtgctggtaccgggcacgcttcgctcgtcacactttttatacggcgccgtcagcactttgtttatcggcggaaccgtcagccttcaaagaaaattcaatccggccggaatgaaagaccggctcagacaagctgacgttctatataccgttccgacaatgacggacgccctgctctcactagaggcgtttcccgatacaccgctcaaggtgatttcttccggtgcagactggcccgcttcgtcaaaacaagcgctgtcagagcgctatccccatttgcggttgtacgatttttacggaacgtctgagctgagtttcgtggcgttcttatcgcctgaagacagcgcccgaaagcctgacgccgcgggccgtccgtttgaaaatgttacaatcgaaatccgccgccccggaggagaacgctgcatgccgggcgaaacggggaagatttttgtgaacagcccgatgaaattttccggatacatcaacggcgcaaaacctgatgattccggctggataacggttgatgacatgggatatatcgatcgtgaaggctatctttatatcgaaggacgtgaaaacgggatgatcgtatcaggcggcctgaatgtattccccgaagagatagaacgtgtgctcaaccgctgtccgggcgtcagaaaagcggccgtcatcggcattcctgatgattattggggcagtatcgccgttgcggtgatcgacggacatgcaaatgtaaaggaactgaagaaacagtgccgcgagcagctggcggcatataaaatcccgaaaaaatggctgttttcagaaataccggaaacagccggcggaaagatcgcccgtgccgccgtacaaaagcaggcaaaggacatgatggaatggaagctgtaattacggatgcgaaacggacgattttcgcccgggaaaacggcctgttaaaagactgtctcccagaagatttggcagctccgctgatccgccatttgagccggaacatgcccgaagacattgatgaagtcctgatcggaaacgcgacgggccgcggcgggaatctcgcccggctgtcagccttggccgccggacttcctttgagcgtgtccggtacgaccatcgacaggcagtgcggctccggactggacgccgtgagggtcgcgtgccactttgtcaaagccggcgcggggagcacgtacatcgcgggaggagcggagagcagcagccgttcccctttctcatcccgggcgcgcttttctcctgaacacatcggcgatcctgatatgggcatagcggccgagtatacggcacaggcttacggcgtaacgagaaagatgcaggacgaatatgcccttctcagctatgaacggagcgtcaaagcgcacgaagacggcttgtaccgccgggaaattcttccctgtcacggattcgccgctgacgaaaacatgctgaaaaagcggaacatggagcctctcatctcccgtgccaaacccgtctttcagtccggaggctctgtcaccgccgccaacagctgcggaatttctgacggggcggcggcagtttgtatgatggaagaacaaaaagcgcagtctctcggtttaaagccgggattgcgttttatcggaagcgcggtaagcggcgtccatccgcattatccgtcagcagctccggtgtatgccgtcaaaaagcttttgaaggaacgggacctgtcaccggatgatattgatatatacgaaatcaacgaggcgtttgccgtcaaaatatgcgttttttcacagcagcttcgagtgccgtattctaaaataaatgtccggggcggcgctctggccgtcgggcatccgtacggggcttccggggcggcgcttgtcacccggcttttttatgaagcaaaaagacgcccggatgcccgctacgcagcagcagcaatcggcagcggagggggagtcggactggcgcttctctttgaagtgttaacgtaacggcagtataatagatgatatcgataaaaaattgatcggagtggagactttatgactgccgtttgtttagtaagacatggagagactgattggaacgcccaaaagaagcttcaaggcaaatcggatattccgttaaatgcgacgggagagcgtcaggcgaaagaaacaggagagtacttaaaggggtccgaatgggatgtcatcgtctcaagtccgatgaaacgggccagaaaaacagctgacattattaacgggtttttgaatcttcccattgtcgtcatggaagatttcagagaacggagctacggtgatgcggaaggaatgtctttaccggaacggtcgaagcgctacccggataaaaactacccgaacatggaaacagcagaagagctgacagacagaatgcttgccggtttagtgaaagttcaggagcggtttcctgagcaaaaagtactgatcgtcgctcacggcgcagccattcacgccctcttgtccgccatttcagacggtgataccgacatacaaaacgctaagcttgtcaatgcgtgcctgagcaatatagaacgaattgaaaataagtggtgcatcaaagattacaatgtaagcagccacctatcagaatcataacaaaaaggcccgaattcagttttgggcctttttggcgagcatttttttctgaagatcatgtaatatggcgtccgcaccgtcaatgctccggcgctccgtccataccgccctgtccgcgcgataaacgtgtccgttttttacggccgtcagctgtttccagaggtgatttttttcgggttctttctcaccgtccagcagcacgatgtaatcaggatcgatatgcaaaagctgcccgggcgtcattttgatagagtctgatttcccgccggaatccgtctggaccgcatatgtaaaccctgcgagcgtcaaaagccgggatgtgaaaaaccggtcatcctttacggaaatgctgccatttgcagcgtcaattaataaaatcgtgccgccttctgcatccagctttcttttgatgtcattcagcttttcttcctgagccgacaattgtttctctatgatgccctctttaccgaccgccttttcaatagtaagggcagcgtcaaccgcatcctgataatccgcagcttcattttttaaagcgattgtcggagcgatctttgtcagttttcggtatatccccctgtgaaggcttgagtctgcaatgatgagatcgggttttaacgaagtgatctttttcaaatcgggatgtgacggaggcccgacggacggactgccgtcgtttcgctccgtccggttatccgccgcggccgccggctttatgccgagatcatggagggtatcaataaagccctcattcaatacggcgatgcgctgcgggtgcgcagtcacatgcgcggtccccagatcgtgcctgacggcggtttcatgttcctgttctgagcatgccgttatgaagagaacggataagatcatcagcatactgaaaattggtttcatctgttcctcctctttcgtttttccgcaattatatcattgacaatataagtatcaatgatattcattatcattatttttataaaatggtttcacagcttttctccccgtcaagaaagccgaagactgattcatgccggcggctttatttcattccgctttcgtttccatcagacttctgcattcaacaaaaggtgacatttatcctgtttttgcctcagcttccaaaaatggaatcaaaccgttcgacccagcaaacaagagagcgattgcggctgtgtacaaatactcatgtccttccatcggttttttccattaaaatttaaatatttcgggttcctattaaacgaaagagagatgatatacctaaatagaaataaaacaaactgaaaaaaattgggtctactaaaatattattccatgctatacaattaatccacagaataatctgtctattggttgttctgcaaatgaaaaaaggagtggataaagagtgagaggcaaaaaggtatggatcagtttgctgtttgctttagcgttaatctttacgatggcgttcggcagcacgtctcctgcccatgcggcagggaaatcaaacggggaaaagaaatacattgtcggatttaaacagacaatgagcacgatgagcgccgccaagaaaaaagatgtcatttctgaaaaaggcgggaaagtgcaaaagcaattcaaatatgtagacgcagcttcagctacattaagtgaaaaagctgtaaaagagctgaaaaaagaccctagcgtcgcttacgttgaagaagatcacgttgcaaaagcgtacgcgcaatccgtgccttacggcgtatcacaaattaaagcccctgctctgcactctcaaggcttcaccggatcaaatgttaaagtagcggttatcgacagcggtatcgattcttctcattctgatttaaaggtagcaggcggagccagcatggtaccttctgaaacaaatcctttccaagacaacaactcccacggaactcacgttgccggtacagttgcagctcttaataactcaatcggtgtattaggcgttgcgccaagcgcatctctttacgctgtaaaagttctcggcgctgacggttccggccagtacagctggattattaacggaattgagtgggcgatcgcaaacaatatggacgttattaacatgagcctcggcggaccttctggttctgcagcgttaaaagcggcagttgacaaagccgttgcttccggcgtcgtagtagttgcggcagccggtaacgaaggcacttccggcggctcaagcacagtgggctaccctggtaaatatccttctgtcatcgcggtaggcgctgttaacagcagcaaccaaagagcatctttctcaagcgtaggttctgagcttgatgtcatggcaccaggcgtctctatccaaagcacgcttcctggaaacaaatacggcgcgtacaatggtacgtcaatggcatctccgcacgttgccggagcggctgctttgattctttctaagcacccgaactggacaaacactcaagtccgcagcagtttagaaaacaccactacaaaacttggtgacgctttctactacggaaaagggctgatcaacgtacaggcggcagctcagtaaaacataaaaaaccggcgtcgggcatggccccgccggtttttttattatttttcttcctccgcatgttcaatccgctccatgatcgacgggtggctccctctgaaaattttgacgagaaacggcgggttgacccggctcagtcccgtatcggccaagtcctgaaacgtctcaatcgccgcttcccggtttccggtcagctcgatgccgtagcggtcggcggcgttttcctgataccgggagacggcattcgtaatcggatcagaagcaaaactgagaacggatatgagcagcaataacagcgggagggcggccagatcttcaggcccctttatatgaagcattcggccgaagaatttggacagccgcttataaagcttgtcaatgatatagaacccggctaatgacagcagcagatacccggccagtccgatgtacacgtgcttcatcacatagtgccccatctcatgccccataatgaacaaaatttcccgatccttcagtttgttaagcgtcgtatcccacaaaacgattcgcttattcgaaccgatccccgtcacatacgcattcagcgcattcgttttctccgacatatttacttcataaacatggctggccggaatgtcggccttgtcggcaagcgacaaaattttgctttccagctccttgtctttcagcggatagaaatcattgtataaaggatcaatcacgaccggctgcaggaaaaacaaaaacagggtaaacggcacagtaagacaccaagcgtaaaaccaccatttttttgtatgctttgtgatcagccagtaaaacacaagcacacacacggcaaacagcggaaaactgatccagaaatcaatgacatggtctcttatccagcttgctgttgtctgcgtcgaaatatgatacgcaagcgaaacccgatatccgatccactcaagcggaagcgaagccgccgtaacgatgagtgaaatcacaaatacgaagcttacaatttgcagcacccgaaagcgcaccgctgtttcgagccaatgctttatttttttggcaagccccgtaatgagcagcagaaaaaataaaaaccaatctaacggcgctccgatgaaaaataaaaaatcttttacatttgaaaagttttcagcggctgccaggcggcccgggtccataaacgaggacggatcggctttcgttccctttacggcctccgggacggcggagtctcctgtcataaagaaataccaatagaaaaaaaggccgtacagcacataggcaagccccgctgccgctatccatttgcgcatggaagtctccctccttagccttatgacttactcctattgtaagcataaatgcaaataaatagaaccaagcctccgaaacggatgttaatcttttcacaacagaaaagaatggaacaacaggaagcgggaaagactaaaagacggagtgatgaatatgaaaaaaataatcgcgtttattgtagtaatcgcccttttggttattgctttcttctatgtatacagccggaccggcgatgtgtttccatcaagcaacgcagatctgattattctgtctgagcacggaaaaaaagaaatcaaaattaaagacaggcagaatgtaaaagatatgctcgatatcttgaaccaaggaaaacaagtcaaactgaccaaaagcgtatctcccgattacgacggaacggtcaaataccatgaagaccgttttgattcattcagcatgtggctcgaaagcggcaattatatgatgtacaagtataaaaacacgtattacaaactgacccggcatgatacgaagcttgtgcaaagcatcattaaggaagaatcacagagctgaccggatcagcatgtaaaagcgaagccccccggcttcgcttttcgtccgtcatttcggaagcatgtcccggaccgcccgtctcagcagcttcccggtcgcgttcttcggaatctcatcaagaaaaaccacttccgccggccgtttatattttgccaaatgtgtttcacagtaatcaaaaaccgcctgctctgtcagctcaccgtccccaggcactatataagcatgcaccgcttcccccgttttggcgtcaggaacgccgatgaccacggcttctttaatgccctcatggctgtagagcacttcttctacttcgcgcggatagacgttatatccgccgacgagaatcatatctttttttctgtcgacgatataaaaataaccgtcttcgtcgcgcttcgccaaatcacccgtgtacagccagccgtctttcagcgcgtgctccgtctcctcgggcatcttgtaatagcctttcattacattcggccctttcacgatcaattctcccacttgatggtcgggcaattcgcgtccgagtgtatcgacgactttattttcgacatgtaaaatattcgtcccaatcgagccgggctttctcccccggtcaaacggattaaaacaagtaaccggagacgcttcagaaagtccgtacccctccagaatggtgacgtcaaaggtttgttcaaacgtctgcaacagagcgaccggcatggaggccccgcctgaaatgcacagtctgacggacgcaaaatcctccgccttgccgtgctcgtattgatacagatagttatacatcgtcggaacgccggcaaaaatggttgcctgacggcttttaatcagtttaaacacagaagccgggctgaattgcggctcgattaagacacacgctccgctcatcagaggcgcattcatacaaacggttaaacaaaaaacgtgaaacatcggcaatgccgccacaattttgtctttctcattcattcctaagtatccggcgacatcatttgcattggagaaaagattctgatgggtgagcatggcgcctttcggttttccggtcgtccctgaggtgtacaaaatgacggcagtatcgtctttggacaatgtcggataagttctgctgcgctccgccgggcggagcatttttgcaaacgttgtcatttttaagcgcaattgagggtcttctgtcgatggagcgttctctgctgtctggctgataatgatatgctccagcagcggcagcgagccgtgcaggctttcaaatacgggaattaaaaggtcgatgccggcgatcgctttgacatcgccgtttttcagcatgtatgcgatttctgaaggtgtatatgccggattaacaggtatgacgacaattcccgcttttaacgcaccgaaaaacgcaataacaaaatcaggcgtatttccgagcagcagcgcgagatgatccccttttttcagtcccctgtcctccaagccgtttgcaaatgctttgattttacctgccagctcctcatacgtcatgtactgatcttgaaacagacaagctggtttttccggtttctgcgatgccgtttcttccaatttggaaaccagattcattttcccacccctttaaaaaagtaatgaatgaatagtcattcatttatccggaataaacgttcacttttattatagaaaaatatagaaaaacactcaagggcaaaaagccccgagtgccgtaaaaccggaaactataattgtttcagcgcttcactgaccggcgtgccgcccgctgtcagatcgaatgctttttcatacgtattcggttcatcaagggatgcgataacggtcttggcgacatcgtctcttgaaatggagcctctttctaaatcggccgcggctttgatatttcccgtgccgggatcatttaataacccgcccggccggataatcgtataagtcagaccgctcgcttcaagaattttatccgcataatgctttgcggcgtaatacggcttcagcgcttcattccaattgccgcggttatgagcctgcagggcgcttaccataatgaaccgcttgatgccggctttctttgccgcttctatcgctttcgccgctccgtcaagatcaatcaaaagcgtcttatcgtatccggtgcttcctcctgatccggcggtaaacacaatcgcgtcacagccttcagcggctttcgcgatgtcttccgtgcttccttccaaatctgcacgaacggcttctgttcccgcggcttgaagtgcatctttctgctcttgtttccggaccatcgcccgcagcgtatgtgtgccgtctttttgaaacagcccggtcagccgctgtccgatctgtccgtttgctccgatgagaaatactttcatcatgatccctccccattcattatggttctatcatttcacaaaaacgggcgctgattcaaatcatgcgttcggcaaatgttctaataaatcagctcgaggaaatcttccagctctattttgccgaaatactgtttcagatcgattccggccagcgcctccctgatagcggttctgtcatactgttttccggtcagcgcctgttcgacttcactcacatctttcgcaccgaagaaatcaccgaaaattttgcagtcctgaatgattccttttttcacttcaagacgcagatcaatcgatccgaccggataacgtttcgaatgctgaagattaaatgcgggcgaccttccgaaattccagtcccagttttgatagcgctcttcggaaatcttccggatcgctttccagtcttcatcggtcagtttatattccggcacttcggaaagatcatttgtattaaaaatatggtgaagcagatgctttttgaattcgtccgccgtcattttgtcatcaagaaactcgctgatgttggcgacacggcttctgattgacttaatgccttttgattcgattttgtcttttttcactttcaaggctgacacaacatgatcaatggcggaatccagcattaatgttccgtggctgaaaatacgccctttcgtcgaaaattgagcgttgccggaaatttttctgccgtccgcgacgatgtcgtttcggccgcttaattcagcttccacaccgagctggcgcagcgcctgaataacgggttcggtgaattttttgaaattgtgaaagctgtcgccgtcatccttggtgataaaactgaaattcagattcccgaggtcatggtaaaccgcaccgcctcctgacagcctgcggacgacgatgattccgttatcttctacgtatttcgtattgatttcttctattgtgttttggttcttcccgatgataatcgacggctgattgacataaaacagcaggtatgtctgttcagggtcgagatgcttcacgcaatattcctcgatcgcgaggttgatcctcggatcggttatgttttggttgtcgataaataacatggtgctcctcctttatttctcccacttcaatccggaagcggcgattgtcacttcgcccccgaacacggattccgcttcttctttcagcttccggtgctcgccgaaatgaggcagatgcgtgagaatcagctcccccgctccggcctccttcgcgatacgtccggcttccaaactgttcatatggccggctgacgtgccgtcctggtctgcgtaaaaattgcactcgcagatcagcagatcggcattttccgcaaacgggataaacgcgtcctggtagcttgaatcagccgtatacacaacagaagctgaaccgtcagtaatccgcatcgcataacaagtgaccggatgcaccgttttcagaaaggtaatggtgaacggcccggcagaaagcgggcggttcggctgataggccactccttttgtatgcgttttatatgtaagacgctcaaactgttctatatcagcatcatgcccgtaaatcggcagtgcatgcgtcccttttccgagaaaggagccgacctgtttggcaaattgaagcggcccgatatcagcgatatgatcatggtgataatgggacaaaatgacggcatcaagcccttctgccggaacataggcaaacagctttgataatacggcgcttccgcaatcgacgagcagagaatagccgccggactgaaacagatagcctgaagttgcttcgtttgcggccggaaatccgccgcagcatccaatgactgtaattttcatatgatcctccgaatgtttaggataaaaagatcctttcctccaatatacctatttttcgtacaaattgcatgttttaaacattgtgccaaaacagccgttgattttccaaaactgttataatacaatgtagagacaaaacaatgaaagagggatgggtatgttggaaaagatgtcggattttttcagaaatttacccggtaagaaatgcgaagaatgcggaaatgagattgttgagcagtatgagtgtcacattaatctgtgcaatgactgcttgaaaattaaggatatgtgacaatagggcgccgcacaattctaagttgtgcggcgcctgttttttcggcctcatcatactttctgaatagggcgttattcaccattattagcaattatctgtacgttttaaaagattcagtattttcaatctatatttttctatagacggattgttttcttttctattataatttgttctaatagctatctttttagatacttattgcacttttttcttcgggaggtaatctatgaaaaaattacgctttggactagcgacgcaaattttcgtcggactcatactaggggttgtagtcggtgtcatctggtacggcaatcccgccattccaacatatttacagcctatcggcgatttgtttttacgcttaatcaaaatgatagtgattccaattgtcgtctccagcttaatcatcggcgttgccggtgcgggaagcggaaaacaagtcggaaaattaggcttcaaaacgattttgtattttgagatcattaccacttttgccattattctcgggctggctttggcgaatctgtttcatccgggaacaggcgttaatatacatgaagctcaaaagacagatatcagtcaatatgttgaaacagaaaaagaacaaaataacaaatctatcgcagacacattcctgcatatcgtaccgacaaacttcttccaatcattagccgaaggagatctgcttgccatcatctgctttaccgtgctgtttgcactcggcatctcggcaatcggtgaaaaaggaaagcctgtcttggccttctttgaaggtgtttctcatgcgatgttccatgttgtgaacctcgtcatgaaagttgcgccgtttggtgtttttgcgttgattggtgttaccgtttccaaatttgggctcagttccctgctttcactcggtaaactggtcggtttagtatatgtagctttggctttctttctcattgttgtattcggaatcgtcggaaagcttgccggagtaaacattttcaaattcctcgcctatatgaaggatgaaattttattagcgttcagtacgtcaagctccgaaaccgtactcccccgcgttatggaaaaaatggagaaaatcggctgtccgaaaggtattgtttcctttgttgtgccgatcggatatacctttaacttagacggatctgtgctgtaccaatctatcgccgctttattcctcgctcaggtataccacattgacttgtccatttggcagcagattacccttgtgcttgtcttgatggtcacttccaaaggaatggctgccgtgcccgggacttctttcgtcgtcctgcttgcgacattaggcgcattcaacattcctgcagaaggccttgcattcatcgccggtgttgaccggattatggacatggcccgtacggtcgtcaatctgaccggaaacgcgctggcatccgttgtgatgtcaaaatgggaaggccagtatgatcccgttaaaggcgcgaaggtcatgagcctcgccaaaacagaacaaaacacaaccatctcaggttaaaatgaaaaccctgcacggaatgatttccgcgcagggttttttatgccatcggcgatagaacgtaccgatgcaaaagcttcgccgtattaagaagcgataattcatgcgtgcgttcaaaagcgtgtgaagcatcaattcccgggccgatcagcccgtggacgatgtcatggcccgaacggatggctgctgaggcatcagaaccgtaatacggataaatatcaagctgataatcaatgccatagcgctccgcaagcccggccagatgttttctgagctgataatggtacgggccgctcgcatccttcacgcaaatggagacggtatattcatccgtagactggccgtcgccgatcgctcccatatcaacagccaagtattcgacggtctcaggaggaatgttggaattgccgccgtagccgatttcttcattattagaaatcagaaaatgcgtcgtatacggaagttcgattttctcttccgtgatgcggcggattaaattcaagagcagagccacgctcgctttgtcatcaagatgccgggacttaataaagccgctcggcgtaatctgcacgcgcgggtcaaatgagatgaaatcgccgaccctgatgccgagatcagacgtctcttccttcgtccggacaggctcatcaaggcggacttccatattctcctgattccgctctgccttgccggcgtccttgtagacgtgcactgaagtctgatgcattaagatggtgcctgtataggttttgccggaagaagtttggatctcgcaatattccccttcaatcgagtgatatcggaagccgccgatcaagtcaatcttcagccggccgtccgcctttatctcctttaccatcgcgccgagcgtatcgacatgcgccgtcagcaatctgtgtttcttgtcatcacggccgggaattgtgacaaaaagaccgcctttgcggtttctgtaagaggagacgccccattcttttaaaagactttctgtataggcgataacctcgtatgtattgcccgtcggactcggaatcgacaccaattctttaatcagttccatcgtatgtttcatattttccacaggtcattcctcctatcaattttattcttcttaaaatatactcttttgatccacaacccgtccaatcttttccttctcttttttcatagaatgaagggagcatgagcataggagggaaatgtatgatcagccgtaaaccgcacaagcggaaaagatttcataatgattggtttgaggattggtttgaggatgattggtctggtgcagccttctggggctgtaaaaaagaaaaagatcactgtaaaaagaaaaaagaagacccttgtaaaaagaagaaagacaaaaagaagaaagaaaaaaagaagcatcatcattcatgccgccgctgctgccgtcattggtaatcgttcacacaagcccgttttacaaatagattctcatgctccccaaacagcggatgctgcttgggtttttttattaaaattagtaccaagtaataatatcaggtgttataatctgatataaaggagtgattttttcatgtcaaaatctaaaattacagcaatcggtacatatgctccggcacgccgattaacaaacgcggatttggagcgcatcgtcgatacatctgatgaatggatcgtccagcgcaccggtatgaaggaaagacgcattgccggcgaacatgaattcacatcggatttgtgtgtggaagcggtgaaaaaccttgcagaacgatacagcggaactcttgatgatgtcgatatgatccttgtcgccacaacgacggcggactatgcgtttccaagcaccgcggcacgcgtgcaggcttacttcggctggccgcacacaggggcgcttgatattaacgccacatgcgccggactcacttacggccttcagctcgcagacgcattaattactgccggttcccatcaaaaagtgattgtcattgccggtgaaacattatcaaaggtaacggattatactgaccggacgacctgcgttcttttcggagacgctgcaggcgccctattggtggaacgcgatgaatcagcgccgggctttttggcagccgtgcaaggaacagcgggaggaagtgcggacgtgctgtatcgcacgggactgagcgcagaattaaacggcgagccgcttaaaggcggaggaaacatggtgcaaaacgggcgcgaagtatataaatgggcggccagaaccgtgcctgaggaatgcaatgcccttttagaaaaagccggcttttcaaaagacgatctggattggttcgttcctcacagcgccaacatgcggatgatcgaatccatctgtgaaaaactgcccttcccgcttgaacggacattaacaagcgttgaatattacggcaacacttcatcggtttctattattctcgcattggatgaagctgtgaaagcgaaaaaactgtcggaaggccagacgctggtattattcgggttcggcggcggattgacgtataccggactgttggtaagatggggattttaatggtacgacgatcgaaatctaaaaaaagaggccctgagcatctgctcaggagcctctttttcttatgctgttatttcttcttccgttttgtgttcttttttgctttgcaccgtaaaatacacgatggtcagcgcgatcatgacaacggcgatgcccaacagaatggatgcctgctgccacatatagccgtaatcgccatttgaaatgacggcgcggaacccgttgatgctgtaagtcatcggcagtgccccgtgaatcacttgatagaatcccggcaggagttcaagcgggaaggttcctccgcttgccccgagctggagcaccagaatgatgacagcgataaagcgtcccggatttcccatcgttgtcgccaataattgaatcatggacaggaacgcgatgctggtaatcatcgtaaagagatagaatctccaagtgctctccacatcaagcccgattcctttcaacagaaccgtggcgactataacggattgaatcagtccgacgagcagaatgacgctgaatttgctgaggaaccattcaaaaccgtttctcggacgccctgaagcttcactcagagggaatacgaccgtcagcatcaatccgccgacatacaagcccatagagagaatataaggcgtcagtccggtaccgtagttaggcacggaatgaatcgcgttatcgtccgtttttaccggatcggcaaacatgctgtacgttttgtcatctgtcttaatgtccccggtttgatcggccgcatctttcagctggccggacaattgtccggtgccgtctaaaagcttgcttaaaccggtgccgagagacgcttgaccctgctcaattttggacgagccgtcatggattttgttttgcgcgtccagcagtttcgttaagccgcctgatacctggccgctccctgacactaacgcttctgatcctgatttgagctgtccgaacttgctgttgtattcgccgatgccggctgtcagtttgttttggctttcaaaaacggtctgcgctccgctgtacaatttatcagttccagccgtcagctggttaatcgcgtcttgtaccgccgctgcgccgttatacagtttcgatgtggactgaggcagtgctttcagctgatcagccttcgcttttacatctttgagcgcgctttttatggctgacatatccggaagctgaatatctccgccggacggaagctggctgacgatattgtctaaatccggaaggtcggccttcggaagcttctcattcagaagctgaacaagtttcgctttttgctcatccgttaagaaatcactgtccttaatcacctttttgaccgcgtcatcccgggcatccaggttgtttttcagatcagaaagcttcttcttaaactgctgcaggtccttttcagtctgctcgagctgcccaaccgcgttttcaatgtctgacaggttgactgaattgatcgcatcttcaaatgccgccgctttttgcgacacttcctgcgccttgctgtttaacgcgcttaatccattcgttaaatccggaagcttttgctggagctgcttttgtgcgtcaaggctcgttttcagcccgctggccacttggcctcctcctgaagcaatctgtcctgatttatcttgaatttcggcgcttgcgctctgaagttttgcgatagagctgtcaagcgtttgaattccgcttgtcactttcgccgctccgtctgcaagctgctgcgttttatcgctgatggtagcggtgctttcagtaagcttcgctaaattttccttcagcttggcgctgccgtctttcgcgtttttcgtgccgtcgtctattttcttggctccgctgctggctttgccgagccctttggcaatatctttaaagttatcaaaaatgacttttgcgtattgctctgtcacttctttcgacacggaggctttcagtttgtcgatcgccttttccccgattgtcgcgccgacatagtttgatccggcattcgtatgatatttcagatccagcttcttcggatttttatccattaccgtgctggcgtttttagaaaaatcttcaggaatctcgaccaataaataatatttagcatttaataagtcctttaacgattgatcaagatcgcttgaaaaatgccaatcaaaattatcatttttctttaactctttcacaagatcgtcaccgatctgaagatgtttcccttcgtagtccgcccctttatcctggttgacaacgacaaccggcagctgatccaccgtgccgtacgggtcccagtacgccttcaaaaacactccgctgtaaatcagcggaacgaataatatggcaatgatggggattaacagtttcttgttcgttacaatgtctttccactggctttttattgtattcaaccctgttgcctccttccgcaaactgactcatttgacaaaacggtcacggcacctaaaaagtgaaggatcatctattatttagataatccttgaccaacatacatttccagcaattcagcgatcgtctctttttcaagaggcggatggtttttttcccagtcaaatatcagtgcgatgtagagcttgagcatcacaaaagcggtcagttccggatcacacggtttaatgcttccgttttcaatggctgtttctatcttttctttaatgtatgacagaatggcccgctccattttcacaatgacatcctgaacggctattgtaccaatctcggcgttctcctgaaaaattttaatagtcagctggtgtgtttttctgaattccaaaatcgcgacaagcgcccggtggacattttcgtgaaatgaaagctccggtttcatcgcttcgtctgcgtgttccttcatttctcttaaaatagtggtgaaaatatcatcaaacagttcttctttgtttttgaaaaacgtgtagatggttcccttccccacatttgcaagctttgccaccagatccattgtcgttgctttgtagccgaattgtgtaaaagacttcgttgccgcttccagaatgagctttttccgatcgacggacatgtttcccacctcgttaaattgaccgtttgaacgttttagtcattttgtacataagataacttatcacagtcgcaaagaagattcaaatgttttttctctttattggtgttccctttacagaacgggaacacgcaaaaaaacctccgttttacgataacggaggctggtacgtttcaaatatataagccagtgaatcatatacggcggcttttccctggtcgatacagtcggggatgcccaccccttcgaaagacgcgcccgtcgcgtatacgcccggataggaagctttcagcgcatctctgaactctttgatgcgctccttatggccgacatggtattgcggcatgctttcgttccagcgggtcacacaggtcatttccggttcgccatttattttcattacttttttcaaatcttccattacgattttaatgatctcgttatctgaaagatctacgatggattcatctccggccttaccgacgtacgctctgagaagcgttttgccctccggcgccgcgtgcggccattttttattcgtccatgtgcaggccgtgatggagaagtcgctgtttcttgagataacgaatcccgtaccttcatgctccatcttgacggcatcctcaggaaaacctaaggcgacgttggcaacggacgtagaatgcatgtctttgagacatgaaaccgccggcagatcagaaagcattttcgccgcggctttatgcggggctgtcacaatgcatccttccgcatagagcactttgccgttatcaagcgtcacggaatatcctttctcctcgcggccgatatgggtgactttcgtgcctttcatcacctttgtcagtgtaagctgcttttccagctcctccaccaacgtttgaagccctgtcgtcagtgttaaaaactggccctgctttttggccgtcagctgctgtcccgaaggctgcggacgtgattttttcataccgagaatcaggcttctgtgcttctgctcagtctgatagaattgcggaaacgtggacatgaggctcagcttatcaatatctccggcataaatccctgataatagcggttctattaaattctcaacgacttcgtcaccgacgcgtctgcggaaaaattcacccagagactgatcttccttcggtttgctcgcaggcaggacaaagtcaagcgccgcccgcgcttttccgggaacagaaaataaaccggtggagatgaaaggagcgattttggtcgggatgcccatcaccgcgcccttcggcatcggatgaagcgtctcgttgacgagcacataagactggccggtcgcattgttgacgagcagatgctcaagccccaaatccttgacgagctgcggcgcgctttttttcctttccaaaaaagaatccgggccccgctcaatgatgtagccgtctttatgcgccgtctgaattttgccgccggctctcgggcctgcttcgatcagggtgacctcaagcggcagctgtttttctttgatttctttttccatgtagaaggcggcggctaatcccgttatgccgccgccgatgatgaccagatgttttttatcgccactcatttttatcgccttctttaccgtttaattctacttgtccagctctttcagcacgaccgctgcaagcgcgtcgataaattcaggctgtgcgttcggcatagccggacgatagtagcttgcgccgacttcttcggtcacagctttgcattcataatcattatcgtaaagcacctctaaatgatcggcaacgaagcctgcgggcacgtatacaaatgctttataaggatgcttttgatacagctcgcgcgtgagatcctgcacatccggcccgagccacggatcaggggtgttcccttcgctttgccagccgactgcgtaatcggtaattccggcgccttcggcaatcagttttgcggattcctccagctggtcaggatacggatcgccgtattcttttattttttcaggaaggctgtgcgctgagacgatcagcatcgcgtcattccgttcttctttcggcattgattcatacgttttcttcacctggccgacccaataatcaacgaatttcggttcatcataccagctttcaacagacttgatggtcaagccgccgagcttctccgcttcttctttcgcgcgtttgttgtatgactggacgctgaatgttgaaaaatgaggggcgagcacaaggctgacagcttctgtaatgccgtctttatgcatgtccgccaccgcgtcttcaataaacggttcaatatgttttaatccgatgtacactttgaatgttacgtcatcctggatttcatttaaacgctgtgcgagcttctccgcctgctcctgcgtaatttttgcaagcggcgaaatgcctccgatcgcttcatatctgtcttttaaatcttgaagcatatgaggctccggctttcttccgcgtctgatatgcgtataataacgttctatgtcctcttctttgtaaggcgttccgtaagccatgacaagaagtcccattttctttttgctgctcattttgttaaacacctcttttgatggtctgtctaccttgattttgacaggaaaatcttcttataaccaacgatctgctcaggaagattgttccgtttttttggccgcggaatattcatgtacaaacgccgtcagctttttcagcgttgccggattgacatcagggaatacgccatgccctaaattgaaaataaacccgtccgttttcatgccttgatcaagtatcgctttcgcttttttctcgatgacttcccaaggcgcaagaagaagcgacggatcaagattgccctgaaccgtttttgtaatgccttgttttctggcgtcatctatgccgagtctccaatcaagaccgacgacatcaagaggaaggtcatgccaatccccggccaggtggcttgcgcctacgccgaacatgatcagcggaacttgttctgctgaaagctcccggaaaattctgtccatcaccggttttataaactgccggtaatcttcgcggttcagtgcgccgacccatgaatcaaagatctgaatggcttttgcgccggcgttaatctgcgctttcgcataaacgataatcatgtccgcgagcttgtccatcagcatttgccacgcttgcggcatactgtgcataaacgcttttgttttgttgtaatttttagaaggcccgccttcaatcatataactggccagcgtaaaaggcgctcccgaaaaaccgatgagcggaacattcagctgttcgtttacgagtaatcggatcgtttccagcacgtaaggaacatcctgttcgggattcagttcgccgagcttttcaatatctgcagcagagcgtaccggctgatcgatcaccgggccgattccgttttttatttcaacatccactccgatataaggaagcggcgtcataatatctttatataaaatggcagcgtccactccgtactgctcgaccgggagcctcgtcacatacgcgcacagctcgggctgatgcgtaatttcgactaagccgtacttttccttcagcttgcggtattccggctgagacctccccgcctgtctcatgtaccagacagggacgtgatttgttttttctccccgtgccgcttttaaaaacgtatcattaaacgcttctcgtttactcatctgaatttccacctttcctcctgcaaccatacgttcgtgttcttcgcccattacactataccttgttttttcaaaagcgtatagaattgaggcttaatgttcaaaaaatcgccgaattcatgattaagaagaaaaaagcttcggctgaacgtattccgttccctctccttcttgatccgtctgtgaattatatggaacgactttgtatgaagcccctgaaaacagattggcgtacggtatgtcaaagctgccttttcctttcacagaatccagaagcttgtcttttccgtctttcttctcatatattcggtaaacaacccgatcatccttttgaatatcccattttaattgaaccgtaatcagtcccatcgccttaaatgtataacgggccgacagggactttaccgcctccagctcaatcgggctgcccagttccttcacattttcaggctttttgaatgtccgcccgttttctcccgcttttgtgacgatatctttaaagagtctgaccgggtattggcttccgcctttcaggtaatgggttttatccgttttgtcatagcccatccagacggctcccgtcagtccgggagtgtatcccgcaaaccaggcgtcctttgtcgcgccgggggcgccgggaaatgtggtcgtgccggttttccccgccaggtcaccttgatagctgccttgtgaagcggttccttcttttacgacctgctgaagcattctcgtcatattccatgccgtctgtccgctgaagacgcgcgttttgccgtttttaggcccggataacgtttctccgtcttcgtccgtgatgttctctataaaaaatggcttcgtatacattccgtttgccgcaaaggtatgataagctccggcaagctgaagcggggtgacgccttcagacagaccgcccagcgcaatcgcgagtccgttgtcagaaatgttcatgccgtttttctcaagatacgattttcccgtatctacgccgatctgcttcaatgtccagacagcgggcgcatttatgctgtaagtgatcgcatcctgcatcgtcacttcccccttgtactgtccgtcataatttttcggttcatacccgtcgtaggacgtgagtttgtcttggagaagcgaatacggtttgaacttgtcttcctgcatggcgggcccgtatacggcaatcggcttaaacgttgagcccggctgacgcttcgccgtaaccctgttgtatccttttgtcacgtagtcgcgtccgccgaccgccgcgcgcacgcctccggttttattatcaataaagacggcgcttccctctgccgcttgatccgtccccggaaaatagccgctttccttcatgagggtgtatgctgttttctgcagcttggaatcaagtgacgtccggatcgtatagccgccttgaagcagctgttcacctgacatcgaataacggtcttccgcctccttgatgacaagatcaatataactgtcaaaccaaggcgtttctgatgttttcttgacatgaagccccaatgtccggccctgggctctgacggcttccttagcgctgatatagccttggtcgttcatcattgcaagaatcgtatcgcggcgttctttatttttatccggatgttgaatcggcgaataaagagatggcgccttcggaatcgctgccagaacggctccttccgcaacggttaaatcttttacttctttattaaagtagtagtgggacgcggcttgaatgccgtaaacgccatggccgaaataaagctggttcaggtacatttcaagcagcttgtccttgctgtaatcacgctcaagattgatggcgataatgacttccttcgtcttgcgcaaaaatgttttatcatgagtcagaaaaatgtttttcgccagctgctgggtgatcgtgcttccgccttccaccttgccgcctgctaaaacatcccggaacaccgcccggccgacagacttcacatcaatgccgtgatgttcgtaaaaccgtttatcttcaacggcgataaaggcatctctcacatcttccggaacctgctgaatggataccggctcacgattttccgtatagaggctcgcgatttcatcaccgttttgatcgacgatttttgaagatgcgtgcagtattaatttcttttcatcgatgacataatggccgagaaatataatgataatgtatccgattaacgcgagaaaagcggttgccgccgcaattacagccggaataaagaatctttttttctttttcagcataagtcacctcgcctttcttaacttgtagtatgggaaatattgtttcgaattatgtcagaatgagtcgccaatagaaacttataccactcttttgatatactagcaagcaggaggtggctgatatgaaggtttatattacatacgggacagccgattttttaaagacgattgcaaagaaacacccaagtgagaatatggtgctgatgcaaggggaggataatgcggttttaattcatgaaacaaatggagaaaccgtttttcaggcgccccattcatatgagagcatcgacagcgtcggggaaatcaaaaagccgggctacgccgtcctcaacaacatcgccgttacccaggaaggccgtccgctgtttgaaaaccggtttaaaaaccgcgccggaaaggtggaaaatgaacccggttttcaagccatccgcgtattaaggccgctcgaaggcgatacgtatgtcatcctgaccctgtgggaagaagaaaaagcctttcagggctggcagcagtcaaactcttatcaggaagctcataaaaaacgcggaacatcagccggcatcgacacgacgtccattttctcacgcccgtcttatgtaaccgcttattacgcaatagactgaaaaccgccggagattctccggcttttttaatgtcccgattttacgcttcgttcttgcaccttccgcccgcctatgaataacctgtagcaatcctatttataaacggagtggttcaattggggatcggcgtctactcggtacatctgctttatgttgcttttatcgcggccattatcgtttttatgcttctcagaaaagatacaacctttatttcacttgccggcatttttgtgattgcgctatggacgacgcattcattctccgcttcggtcagcagcctgtttcacagcttcacgtatgccgccggagaattgctgccgacgatttttatcatttgttttatcgtggcgatgagcggcctcttgaccgaaaccggtattaatgaagcgatgatttctccgtttgcaaagctgatgaaagggccggctgtcgcatattgggttatcggctgtctgatgtttgccatctctctttttttctggccgtcaccaggggtggcgctgatcggcgctgtgctgcttcccgcagcgatccgggcgggcctttctccgatcgccgcggctatggccatgaacctgttcggccacggattcgctttatcgggggattacgtcattcaggcggctccgaaattaacggccgatgccgcgggcattccagtgagcgatgtcatgcaggcaagtattccgctcgttttgatcatggggttaacgacgacaatcaccgctttcttcctcatcatgcgggatcgaaaaaaaacgaaggcccccctctccttggacagctccggttctttggacacaagtatgtatctgccgaaaaaactcagggtgatcctggcggttttcattccgcttgtttttctcgccgatattatctgcatgatcgtataccgtctgcaaggaaacgatgcgacggcactcgtcggaggaaccgcgatcggcattctcctgatcattcatttcattgtatataaagagcggcatttagaaaagatcaccgagtattttatcggcggttttcaattcggctttaaagtattcggccccgtcattccgatcgcggccttcttttatctcggtgacgcggggtttaaaagtattttgaacaccccgctgccgaaaggatctgcggggatcgtcaatgacctcggactggccctgtcccattcttttccgatgtccggagaattcgccggcatcgccctgaccgcagtcggtgcgattaccgggctcgacgggtcagggttttccggtatatctcttgcaggctcgatggcaaagctgttttccgccgcgcttcatacggacccggccgttttaacggcgctgggacagatttcagcgatctgggtcgggggcggaacattggtcccttgggcactgattcccgctgcggctatttgtaaagttgacccgtttgagcttgccaggaaaaactttatcccggttgcggccgggctagtcgtcacaacgatcgccgccatcatcattctcccgtagcaaaaggattgaaatcttctgacattttctatacaatcatgggaaaagcagacgagggggcatcgcttttgacgttaacgacacttcaaaaaagcttaaacgctcagcttgacgggctgtatgaggaaatggttgaaatcaggcgtcaccttcacatgaatcccgagccatcctttaaggagaaaaaaacaccggcgttcatcgcctcattttatgaaaagctcggcgttcccatccggacgaatgtcgggggcaacggtgtcacagcctatattgaagggagtgaaccgggaccggtcgtggcactcagagctgattttgacgctttgccgatacaggatgaaaaagatgtaccctatgcttcacaaattcccggcgtcatgcacgcctgcgggcacgacggccatacggcggctctgcttgcggtcggaaaagtgctgtaccgcaaccgggaaaaactgaaaggatcatttgtgatgatccaccagcacgccgaggaattatctcccggcggagcaaaagcaatgattgaggatggctgtctcgagcatgtcgatgccattttcggcacacacctatgggcgactgaacccgtcggaacagtcttatgccgcccgggcgcagtgatggccgccgctgacggctttacgattaaagtcatcggcaaaggcggccacggcgcgattcctcacgatacgaaggacgccgttttaatcggctcacaaatcgtcacggctcttcagcatatcgtcagccggcgggtaaatccggtgcagccggccgtcatctcagccggctcgttcatcgctgaaaatccgtttaatgcgattgccgatcaggcagttatatcaggcaccgtccgctcgtttgacgaaagtgtgcgcagcctgctcgaagcagaaatagaagccgtcgtaaaaggaatctgttccatgcactccgcttcctatgaatatcgtttcaagcgcggttatcccgccgtcgttaatcatcctgaggaagcagcgcacgctgcggcagccgcagcggaaacagagggcgtctcgaaggtcattgaaggagagccgcagatggccggagaagatttttcttattatctgcagcatacaaaaggcgcatttttctttacgggggccgctttagaaaacgcggaaaccatttatcctcatcatcatccgaaatttgattttaatgaaaaagcgatgctgacggccgccaaggtgcttatcggtgccgcggtgagctacccccgatagggcataaaaaacagccggtacattacgtaccggctgctgtgattcttaaatgaaaaacgtgccttgccgtctcaccgagctgtgacagcagtttataattggccgctccgcccacggcggctccgacgaccggcaaaagctgaaacaatttcaccacgtccagataatcgcggtattcctgctgaagaactctccaatcgacatcatgctttttcgaatcccattgttcaatcattgagtatatgcgtttccgctgttcaccgcttgagaaagccagctgaaaaataaacagcaaaaacaatcgctcatccctgtctttgacatcatagccgtaaatggaggcaagatcgaacagacatttcattttaatggataacagcaaaggaaaatcagccatccctaaaaaaattccgccggcccccgtaccgataccttcggctgccgcgaccttttggtacgatgcgatggtttgtctggcgagggcatctttttcagcaagcgtcataccgtgtgtatcccgcttgcttttcaccagatttgaacccgccattgttgcttcggtcattttttttatgctttctgtgatgacggcatgaattttatcgggaatccgctcatttattttcgcctgcattcctttagaaaaacgttcaagcatagaatctttacgcaaaaaacgcgctttccattgcagtgcttcctgtatcagctgctgatcgtcggtcatctgtgtctccttctttcattgaggtttcaaaaacccgattgattacagcttgccgtactttttcaatcttccgcccatatacgaaggcatgatcacaaaaatgagaacggctgaagcaacagccgcatacagcgccccgctgactcccgcggcataggctgacgctgcacagaacagcagcgcctgcacggttaatgccgatttcatcagcgaaaagaaactttgcagcttcgctttctgattgaccgggtaaagctcctgcagagaaagatgatgaaaatgcccgaacagcggcagaagctgtattcccgtaataaagacggtaaatacggctaacgccgccgttatccacggatttgcggaaacgagcataataatcaggataaaaataatcgtgagcctgacctgaatgccaagataatcatttgaacgcagaaaggcccgcgcatacatataggagaacgttttccgctgttcaaacggaatcattctgagcaaaaagtcgagatacgcccggcgttttgcctgttttttcaggtgaggcacatcggtaaacagattggcgattctgtaaaaccgctgcttccttcttaattcatattcaatatgggcttcccattttaatgatttatgttttgcggccgatgtaaaatacacataaaggccggccatcacaatgtagacggcggcagcgtacacataaaacgactgtaagacgaagtataaaagcagcatattgcagataaagcgtatgaccgcatccatcattttcatgcttctgtcattcataaacgtcatccgccactccatggcctgattccacgcttttaccgccagcatctgaataaatacggcggcatacgacgcaagcgacgcccccggacttacagcgaaaaacaggggcatgcatacaaccgacagggcaataagcggaaacagctgtgacagatagctgtacttaaatgaattcttaaagtatgtccccattttcggttcaagcggcagcagaaacacgaggtccgcttcctttaacagcgtccggacgtatgaaccggtcagcacaaatgaaaagagcaccgccatcacccaaaatgacggaaaatgaacgggaatgtctttgacccacttgctgtaccagcttgccgcgccggcaataaaaaagatcagcacaatgacgagatgatcattgagcatatatttcatatacattctggtttcctttatatgctcttcaagccgggactgccaaatcgtagacatattattcatggccggcgtcttccttcgtcagttcaatatacaagtcatcaagagctgcgtcttccatgccgaactgctctctcagttcttccagtgtgccgcttgcccgcacttcgccgttatgtaaaataatgaaagcgtcacagtagcgctctgccgtagccaggatatgcgttgacatcagcacgcttgatccggcttttttcgcggcgtccatccgctccagcaatgcattgatcgcaagcgggtcaaggccgagaaacggctcgtcaatgatataaagcgaaggctccgcgagaaacgcgcacatgatcatgaccttctgcttcatccctttggaaaagtgagcgggaaaccatttcagccttttttccattctgaattctttcagaagcggaggaagccttttttcaagcgtttctttggaaaggccgtacgccatggccgtcagctccaaatgctccttgagcgtcagttcttcatacagcaccggcgtttctgggatgtacgtaaattgcgagcggtagctttccttatcctccgaaaacgtcttgccgttcagctcgatcgagcctttatgcgggtccattaatccgataatatgccggatcgtcgtgcttttgcccgcgccgtttaatccgatgagtccgacaatctggttcggctcaagggtgaatgaaacattttttaagaccgggtttctcgtataaccgccggttaagtcttttaccgatagcagagacataatttctccccttctgattcgtttttcttcatagtaccaaaaataaagtctgatttgaaacgattccctttttttctcacgtgaaaagtgtgcatagttatcgttttggcggacatcataatgtatgtagaaggaaacagctttaatcaactgaaaatgaggtgtttataaaagacgtcttagaacagttggatgaaaatcaacatgtcctgtgcttacaatttcttcacacactgctttgatgatgttcttcattcatgatgaaataatcaaatgaggtgtttgtcccaggaatgattaagcagacccataagtcttcattttaaaaacaaatgaggtgcttacaaaaggcatattcaattttctgtgataaagctcgtacttctgcatcagggtgaacgcgcagccgttcatcctgttttttgttttggccgtttttgtggtacgatgagaatatacatatatttcttttcagggaggaaaactatctatgcacaaagcggacgattgtattttctgcaaaatcattgccggtgacattccgtcttcaaaagtatacgaaaatgaacacgtcgtggcgtttcttgatatcagccaggtcacaaaaggccatacgctcgtgattccgaaaacacatatcgaaaacgtgtacgagtttacgcctgagctttctaaagaatattttgaagcggtgccgaaaatcgcacgcgccatccgcgatgaattcgagccgatcgggctgaatattctcaataacaacggtgaaaaagcgggccaatcggtgttccattttcacatgcatatcattccgcgttacggaaaaggcgacggtttcggggctgtctggaagacccacgccgaagactatacgcctgacgatcttcaggagatcgcttcaaccgtcagaaaacggcttgcctcatcttaaagatgaggtttttttgcgtccggaaacacaaaaaacataaattatatttttttatatcaaaaaaatcaaaaaattgtgataggataattgtattatttcttacactaaagcggaaaacagggagagatcgtaaacatggaacgtacaacgaatttcaatgcaggacccgcagcccttccactggatgtgctgcaaaaagcacaaaaagaatttgtcaacttcaatgataccggcatgtccgtcatggagctgtcccaccggagcaaagaatatgacgcggtgcaccaaaaagccaaaagccttctgaaagaactgatggatattcccgacgattatgatattttatttcttcaaggcggcgcaagccttcaattctccatgctgccgatgaactttttaacgccggagcaaacggcgcacttcatcgtaacgggcgcatggtctgaaaaagcactcgccgaggcgaaactgttcggaaacacatccgttacggcaacaagcgcagattcaaaccacaaccacataccggaagcagacctctcaggaatcaaagacggcgcctatctgcatgttacgtcaaacaacacgattttcggaacgcagtggaaagagttcccgaattcaccgatcccgctcgtagccgacatgtcaagcgacatcctgagcagaaaaattgatgtcaaaacgtttgatgtcatctatggcggagcccaaaaaaacctcgggccgtccggcgtcacggtcgtcatcatgaaaaaatcatggcttgaaaacgaaaacgccaacgtccctaaaattttgaaatactccactcacacaaaagccgattcactgtataatacgccgcctacatttgcgatttatatgctgagcctcgtccttgaatggctggctgaaaacggcggtgtcgaagcggctgaacggcgcaatcaggaaaaggccgacgtcctgtacggcacaatcgacgcaagcggcgggttttacgcggggcatgccgcaaaagacagccgttctcacatgaacgtcacgttcaccctccgcgacagcagtctcacgaaaaaattcgttgaagaagcgaaagcggctaaaatgaccggactcggcggccaccgctcagtcggaggctgcagggcgtctatctacaacgccgtcagcctggctgattgtgaaaaactggctcagtttatgagaaagttccagcaggaaaacgaataaatttcttctaacataacggttcctttgatatactgtttgcatatcaatttttcaggccatcgcaataaatgacgagcatattattggatggcgaaaaagcttagcagaggagagcttagtatgaaaacaaaagaattagtcattatggccctgtttgcggcaatcggagcggtgcttcattccattatgccgccggtattattcggaatgaaacccgatatgatgcttgtgatgatgtttatgggtattctgttattcccccgtgtgcagaacgtgctgatgatcgggattgtaacgggaatcatttccgcactcacgacatcttttccgggcggacagcttccgaatatcattgaaaaaccggtaacggcgtttctgtttctcgcgctggcgcttttggtgaagaagagcgtgaaaacagcggccgccgccgtcattacgatagccggcaccttcatctccggtttgctctttttggcgctggcccttctgattgtcggcctgccgggcggattcaccgcattggtgctcgcggtcgtccttccggcggctgcgctgaatacgatcgccattatcattatgcatccgattgtgcagacgatcttaaaacggtccaatatgattgaaacggtgtaataaccgcataccgaaacctcttccggccggaagaggttttttaatgtgtttcagcatgttttatacgagaagttttgtgaaaaagataaggaacaatgcgagggcggttcctgctgagcagacaatggccttctggcggacgacccgcttcggcggataagaagcggcctggccgagcagtttcaggtaataaacggcgcccgccgcaaagacaagagccatacaagataaaacaatcataaagacagacaaccttctccctccttttcccttaaaaaatatgctaaaataaagcaagctatgtatagaagtttattcttctgaacaaaaatgataaaagttatgagaaaaaaaacggggtgatttcaaatggctgacggacgttcccttttaacaggccttttcgtaggcggattgatcggaggcgcagcggtgttactctcggctccttcatccggaaaagagctgcggggcaaaatcaaagcgaattgcaattcaattgaggacacaatcaaacggttaaaaaaagacggaatggcgcttaaggatcagcttgtccaaacggcgaaagaaagcgcagaagtcattaaagacgtaggcggagagcttcagaccagcattaaaaggtggcaggaggaaatcaagccgcaccagcaggatctccaaaaggaaatcgctgatatcgaagagaaaatcagacagctggagaaaaccttacaaaactaatatcctatacaaccaaaaaaagtgcggacatattgcgttccgcacttttttttgcggtttaaagcctttcccagcaacggattaagaatttattataaaattcttaaattttcatctttattaatctttattttattggcataatagaggaaaagaaaatgtgaagcaggtgatctgtattgaatcgtgttgaaccgccttacgatctaaaagaagctttaatctatacccaaaaaatggcgcagctgtccaaagcgctctggaaatctatcgagaaagactggcagaattggctgaagccgtacgaccttaatattaatgagcatcatatattatggattgcctatcagcttaaaggagcttctatttcagaaatcgccaaattcggcgttatgcacgtatcaactgcatttaacttttcaaaaaagcttgaagaacggggatatctgaaattttccaagcggctgaatgataaacggaacacgtacattcagttaacagaagaaggggaaaatgtattcgaaagcctgcttgaggagtttgatccgtcgagaaacgctgtgtttaaaggctcacagccgatctaccacttattcgggaagtttcctgaggttgaagaattaacctgtgtcatccgccacatttacggagaagattttatggagatattcgagaaatcattgacaaacataaacaatgattttgatagtgaagacggaaggctgaagaaaaaaacggacgaatcggctgtccatgaaacggctgaagagctggaaccgatcaacagttaatcaaagtgcttcataatctcaataaattcttccatcagcgctgtataaagcccctgctcatacagagcaaaaatcgtttcatgaacatctaatttttcgttcagctgtcccgcaaaaagcgcaaggagcttgtcaaacgtcacaaagccttgcgctttttgcgactccagctcgtcctccaattcgcggcagatccgcccgacctcttctccttcttcttcggtcagccctttttcaatcatcatcgcataaaaagggtacttatccatatccaccgttttcaccagcaattgtatgtaatattctaaacgcccgatacgctgatccattgaatccatccgtttcacttctttctatctttaatcttattttagctgataatgaatggagaagaaaggttaaaccgtacatttccatgtttcatcgagctcttctgttcttctctttccaggtttatttttttctttaaaaaaggattgattttttctcctgaagagagtaaattattttgagattgtattccatctttgtacggaaggatgactctgatgaattgctggaaaaccattaatctgatcaaagattatggtgcggttcgtttattattgactgctgtaggttttatgatcctgttttttatatgcaacttcttggcattcgggctgctgcgtccgaatatcagtttaagtgacgggcacgtgtttgctttttgtgttctgctcgttgttactttatttgtacataaagtcatacatgtcctgccgatgatctgtaaaaaaagaaaaaaggaaatgaaaatgtacttcttgcggatgccgacatggaaaggcataccgaaaacgacgatgctgatttctacgatcagcccgtttttattcattacgccgttattgttttatgccggactggcatttccgagacacgctcattacttttatatgatttcgagcattcatgcggggtattgcctgcctgatcttctgtttgcgctccatctggtcaaagcgcccaaatcatgtctgattgaccaggaatccgacggttttgatattttagtaaaaaaagtgccggagtcttgatgtcccgctgatttttcaggttacattctatcttttttaataaatatttggtaatgtaatatgggagcagttcagagagagggggaatctcccatcattttattctattttatcgtggctgccctgtttattctttatttcataaacaggctcacaaatacattatgccttgtcagagagattcctgaagaccggcaggataaggtattccgttttattaatgtatctattttaattttactgatctcttcattcgtcgagatctcctttactgtgtaaacaggcaaaaaaatatggctgacggaggtctgacccccgacagccatatttttttcttaataaagccaagaagcgccgatgatgatcaataagatgaacagaacaaccaataatgcaaaaccgcctgcaaatacttcacccatctccaaaagcacctcctacaaaacgttttatttttccaattacatcatatgcaatttacttctgaaacgattaggcgcccgggtaagaaaacggaccgcttttagaaaaagcgatccgtttcgcttaacaaatgtaagctgcacctacgatgataagcaatatgaacagtactacgagcagtgcgaaaccgtttgaatatcctccgcccatggttcattacctccttttcatgatcaatatatttgtatgtatcaggaaaaagtttgactagacgaatgccctttatttaaaatctttttacagaaagccacaatatgttatgatacgcatatgcaatttaatttggatgattaggagtgtttaatggaatgaagaaaatcgcgatagcagctattacggcaacgagcgtcctggctctcagcgcttgcagcagcggcgacaacgacgtgattgccaagacggatgccggaaatgtaacaaaaggcgagctctacacgaacatgaaaaaaaccgcaggcgcaagtgtgctgacacagctcgtacaagaaaaagtattagcaaaaaaatacaaagtatcggataaagaaatcgataccaagctgaaagagtacaaaacgcagctcggcgatcagtacagcgcccttaaacagcagtacggcgaagattacctgaaagatcaggtgaagtatgaactgcttgcacaaaaagcggcgaaagacaacatcaaagtgactgactccgatacgaaagaatattacgacggcttaaaaggtaaaatccgcgcgagccacatccttgtcgctgacaaaaagacagctgacgaagtggagaaaaagctgaaaaaaggcgagaagtttgaaacgcttgcgaaagaatattcaactgacagctcaaaagacaacggcggcgaccttggctggttcgataaaaagtcaatggatgaaacattcagcaaagctgcattcggcctgaaagtcggacaagtcagcgatccggtcaaaaccaaattcggttatcatatcatcaaaaagacagaagaacgcggcaaatatgatgacatgaaaaaagaactgaaagaagaagttcttaagcagaaattaaacgacaactcagctgtacaggcggcaattcaaaaagtcatgaaaaaagctgacgtaaaagttgaagacaaagacttaaaagacacgtttaacacttcaacatcatcatcttctcaatctaaataaaaaaactgtgcgggctctcggcgagccgcacagtttttttatgcgatcgaatgattggagttttcttctgcatccccgttttcacctgcgggcgccgccatacggcgctcgcgttcctgttccatccgttcaatatacacccttccttctttttcaataaacgactggtcaagcttttcctcttctttagctgttgtaaaaagcttataagcgctgaaaataattccgataatgcaaaggtatacccaccaaggaaaaaatagcacgtcggtttcctccctttttcacccagagtctttattctaagctatgcttgataaagacaagttatgagagctgaacgtaaaaaagaccgatcatagagaatcggcctttttatcttattgatggaaagtcggtttgtagaaagaacggttttcaagcgcaaatacacgctctgtgtattcgcccggcttcacccgttccagcgctctgtccatcataatcatttttgcatccagattatcaatgtagtgcagaatttccgcttctttcaccatcggcggtttcgggcttccccattccgcttttccgtgatggcttaaaatcaaatgcttcagaatcagcacttcttcagcgtcaatctgaagctcttcggctgcttttgaaagctctgtcaccatgatcgaaatgtgtccgagcagattcccttccacggtgtacgttgtggagacggggcctgaaagctcttttactttgccgagatcatgcagaatgactccggcatagagtaaatcccggtcaagagacggatacagatcggcaatcgcttttgccaggttcagcatggacactacatgatacgcgagcccggagacgaactcatggtggtttttagccgcagccgggtaatccataaactcagccgcatattttttgaccagatgtctcgtgatccgctggatgtttgggtttttcatttcaaaaatgtattgagtgacggtttccatcatttcatttttcggaatcggcgccgtttccagaaaatcatcaatgctgacattttcgttctcgccggccggccggatgtttctcagcttaagctggtttcgtccgcgatagtgatggacatctccgatcaccttcacgatcgtctgcgccgcgtatgttacttcatcagtcggcttggcatcccacagcttcgcttcgatatctcccgattggtcctgcagcattaacgtcaggaatggttttccgttgcttgcgattcccttagtcgaagatttaatcagaaagtattgatcgacctgctcgccgacctcgtgcagcataataccttttgccattctattaaaagctccctccatatcttacataataccagtatagcacatacctcttttttgaaaataaactcttttatgacaggagccgcatgacttgtccgctgtgaaaagaccggctgacatgctcatggcaggtgaaataaagtatctgccgcccgccttctgaaagctgattcagcacatcaaacagccgctgcagccgctgcctgtcaaaatggacaaaactgtcatcaagtaaaaacggcagtgataccgcagattccctctctgacgcaagggcaaaacgaatcgccgcataaagctgctcgcatgccgcctgtgagagttcgcctgcagaaaacaccgttccgtctttccgcatgaccataatggaatcatcagcctcggagaaatacaatttgtgatagcgtccgtccgtaagcggtccgtataatgcaccggcggtttctaacagacggggaagcgtcacttttttatgccgctccattttttcccttataatgtgtctgaccgtctgtaatgcggcccactctttagcggtttttttcacgcgctccttctgcatttctgtctgctgttttaaatcggatacaagccccgaggactccagctgctcttgcttcaccgttaataatgcggtttgctcacggagctgggcgcttttttcctcaagcgtttttttctctgtttccttctgaacgactgtatgttcaagttcggacactgtgcggctcatgtacggcttcagctgttttccgcctatgccggacaagtgcgttttgatttcgcgcagctgccgctctgtttcccggcggctttcattcagcctggcgagttcacaaaagtgttcgcggttttttgcgcctgccgccatgaaaagctgtttgacctgctgttcgtagtaatgaacttcttcgtttaattcacgcatttgctcttgtgcatgcagcagatccgtttcgagcgcctgttttcgttttgcttcctcacgggcccgttccgcctgagccagcaaaacgtgcagtctttcttttacggacagctcctttccgtctgaaggactcagctttttgacccggtcctcaaatgctctttgcagcttttgcagcctgcccgcttcaatggtcagctcatgcttgttaaggatttcttttttgacatctttcatcacatgatatgcgtccagaagatgggaaggacttcctgaaaaccccagttcattcataaaaagttccgcctgtttttcagacggcgccatttccgcctcccattcttcatattggcggatgaccctttcatatgccgattctttctgttcaagcacggcttgatccgcaatcagctgctgccggtgccggccgtcacgccaaagctcttcctgcagaagatcagccgcttctttggagatcgccggcttctttttcttgtgtccgggccctcctctttctgtcagcagcggtttttgcatgccggacagcatatacagcagcagagcaccggtaaaaagggcggcaggcagccattcctttaacatagcgaaaatcgcaatgaacagaatgcccgcaccgagaaagagctttttttgtttggcgcgctgtttttccagatgctgaacatgtgcctgccattcgtttccttctgtatcagccgtttgcttatatgattgtaaagcggcttctttttctttcctgacagcggggtccaaaatgttttccgccgtcacggcatgttttctttcggcttcttccagctccagccgcgcttgttcgaaaatcgcatcaagctgtgtctttctttctctagcctgtccggcgctctgcacggcttcctgcagccgccattcatattcataatcggtgttcagtgaaagaataccgtcctcctcatgtcttccgagctgctgcaatcctgacgaaacgcgggcagatgtctgccggatctgtgattggatggcggcaagctgttcgccgcgcgattcgtacatatgctgctcgccggaaagctcctgcagctgccgctctttttgcagcaagtcctcatttggagcgagcagatcagcctgccgcctgagttcagccgcttttgcccgaagtccctcaagacgggccgctttcggatggagatgcgattcgtatttttcaagctgatgcattccgtccttcgggaattgcttcaatgcttccggataagaagaaagttcgctttccaaggctgtttttttgtctgcgagcggctttgcttctatcgccgattttactgttttgatttcttcagttatgtctttcaatcgtgcttcggcatcctgcaaacggccgccggcgctttttttctcttccagaaggctgtgatagcccgcttccgcagcttccgcctgtttcagctgggcgctgagccgctttaaggtatccaactcctgatttaagcgggggttccgcccgttcggcttatacatcctgtcaagttcttttgccagtcgcgcgtcaagctttgccgcagcttccgacccgaataagctcgaatacaggagaaactcgccgattttgtcccggttaaaagcttgaatctcctgcagtccgaatacatcgaacgaatagatcgcttcgtacagcgcccggtctgtatcggagagaagctgtttgagccattctccgtccttgatttcgcctgaagccgtatacactctgactttttcggcagcgccttttgtccgttcgattttaacagcaccgtgatcgccatgcttcaattccacagtgccgccgtaaaccccgccgtttttcggttcgtatttttttgatttcggaaaaccgaacagcacgcttttgatgaaggacatcaatgtcgttttacccgcttcatttaatccgtagatcacttgcacgggagaatctgacagctgaaaacttcggtcggaaaattttccatattggtaaatatgcatcgccgttattttcatcgctgaagctccttcatttggcgtcttaaaacggcttgagcctgccgcttaatatccagtatctcttcatctgtaaatgaagccatctgacgccggtatacgggatgacgctcaagggcttcaaatacaccgctcatgtccgcgcattgttctatgtcctgaagcagccctttaaaaaacggatcgggcggcacgctgtctgtttcgtccgtccgatcctcaagcgcaagcggccagacgaaacattcctcttcggcctcttcctcctgtaaagcggaaagaagctcctccgcgatgcctgcgggcgcctccgtccaaaagcggggcgccgcgccgcgaagcaccagcctgacacatgccgggcggcccgccgcgcgcaagccggagaatgtatccgatgcggttttcagaagtgaagtcatatgttcagctccggagatatcaagatcaatctcctcccataacacatcatgcgcttctttgaattcccaagacatctcaccgtttgccgcccggacgagataatatcccttaggtccggtttcttttaaatgccgggcttgaatattcccggggtaaatggcggcgggatgccgggcggacagaacctgccgtttatgaatgtgtccgagcgcccagtaatccatgccgcttttttcaaggtcttctttcgtaaacgggcagtacgggtcatgcccttccgctcctgataacatgccgtggagcatgccgatatgataaggcgcgccggtcattttccggtaacgggccgcctgattgaccgttacgcttctttcctgatagctgcatccatatatgcttgccgcaagctctccgtttttaaagaaagatttttcctccggtgtatccgaggtgaagatatgtacattttccggccattcaatcggcgtccacttaccgcccaaatgatcatggttgccgaatatgacgaacacttggatatccgcttcctgtaatctcgcaaactgttttctcaaaaacagctgggcttttaaacttctgttggcttcgtcaaaaagatccccagaaagcagcacgaaatctgcctgctcccggagtgccccgtccgtcagtcggcggacgctgtgaaatgtgctttctttaatacgcgcatataccggttcaggcagattcgaaatgccgtaaaacgggctgtccagatgcaggtcagcggcatgaataaacgtcagatcagccatctcgccctcccctttctgcaaattgaattacccttattttagcaccgtttttatacgaatgcacgttctgcaaaataaaaaaacagcccggctgttccgggctgtttcacttattttttggagatgcgcagcgcttgtttgatcgctttgaatccgctggcgtttccgtaaatcaaaacgccgcctttgtaaattttcgcgccgaccgccgcaaagatcacgatagtgagcagtgtcagggcgattccggccgcagcctgccaaaacgggatatcgagcatcccgacgcgtaaaaacataatcatcggcgtgaaaaacggaatgtaagatgtaacggtaataaaaccggcgtcaggattgccgatgccgaacatggcgatcataaaacctgccacgactaaaaaaaccatcggctgaatcgtctgctgcacgtcctctatccggctgacaacactgcctagaaacgcggcaagcgtcgcgtaaagaaaatagccgagcaaatagaaaatgacggcatagactatcgtcgagacgggaacatccgtaaaattgagaaatgcactgatcggcgacgacgcatcattttgagggttcagcttcagtgagagataacccgctgcaatcagcaccgcaaactgtgtgatccccacgagcgcgataccgaacagcttggcaaacatctgctgaatcggcggcatgcttgaaattaaaatttccatgacgcgggacgatttttctgtcgccacttccatcgcaatcatgcttgcgtacatgataactgagaagtagatgacaaacagcatgatgtatacaagccccattacctgaccgagctcttcctcagacttcgcccctttttccagcgcgtctttgctgacttccggcggagtgtagaggctgctgactttttctgccgaaatgccgagcttggcggtttcgacagcggtttttgtctgggttaaagcctgcttgagcagtttatacgctgattcatcggaaatggtcagcgccttgtatgctcctgttatcgttcctttttgatcttgtctgatgataaacagtccgtcccattcaccgtctttgacacgctttacggcatctttttcggactccttcgtctccattgcctgcagatcattgtctgtatccgccgctttaagctgttttgcaaacgccgggtacagcccgtccgtttcatcaatcaccgcgatttgctgcttgccgtcatccgattgaaacacggatataatcgattgcaggttggtcaccgctaatactaataaaacggtaatggcggtcgaaataatgaatgactttgtcgcgattttgtttttatatgtatgaaacagcataatccaaaatttattcataaacggcccccaccttttctataaaaatatcatgcagtgacggctcttccaattcgaacttccgtataaaacctttcccttgaagcgcccggaaaatatcctgagaaaccggttcattcgcgacctgcagtctgatcccgtcatttgtttccttccatttcacgacgccttcatgcgtttttaaaaagctgaggtcatcatctgaatgaacggtgacattttttttgccgaaagaccgcttaatgtctttcagattgccttgaacgacgggttttcccttctggagaatgcacaaattctcgcaaagctcttccacatgctccattcggtggcttgaaaaaacgatggaaacgccgctgtttttcaaagaaataaccgcttctttcagcagctcgacattcaccggatcaagaccgctgaaaggttcatcgagaatcagcagttcaggcttatgcaggacggccgaaatgaactggattttctgctggtttcctttcgacagctcttcgactttcttattcttgtaatctgtaatgccgaaccgctcgagccatgtcatgagctctttttccgcctcttttttgcccattccttttaatctcgccagatagacaagctggtcactcaccttcactttcggatacagcccccgctcttccgggagatagccgattttttcactgatggaataattgaccggctgccctttccaggtgatatgcccgtcagtcaggcttaaaagacctaaaatcatccgaaaggtcgtcgtttttcccgcgccgtttgcgccgagcagcccgaacatttccctttcaggtatttgcaggttcaaattgtcaacagcggtaaagctgccgaatgtcttcgttacgttttcaattgtaagcacgaatccaactccttccttgacccattatatactaataatgggtaaaaattaatggaggattttaaattctttattagaatatcattctataaagggggtgacatgatgggacaatatgtattgaccgcattccatgcgtcgggagaaacgctgctgaatgaacggatcgaagcggataatgaggcggaggcgaaggccgccggagaggctttattaaaggaaaaaaagcttgagaacagtactcatcgcttggtaaatgaagccggaaagctgattttattccacagataacagaagctttccggcttctgtattttaccggttaaattgcggcgtccgtttttctaaaaaggcgcggatgccctctttatgatcatccgtttttctcatattttcctgggcctttcgttcaagagacaaaacgtcttttaaccggctgatatggaggctctgataaatagccttcgtttcaatcatcgctgacagcggcgcatgcagcaatcggtcgatatacggttgtgccccctccgcaggacctccgctgaacagcccgtcggccagcttgagccgcaccgctttttcagcaggcaatttttcaccgctccaaatcagttttttcgcttcgatctcaccgacgcgtctcattaataaataatggcctcctccgtcgggaaccaatccgatgccgatgaaattcatcgcgaggcgggcgttttcttcggcgagcaccacatcggcgcacagcgcgaaactcagcccgagccccgccgcggctccgtggatggcggcaatcacaatttttttcatatcatagagggtcagcgtaatggattcgatcattttcatgagccgttcatattctcctgaatcatgatccgacgtcatcatctgaatatcaccgcccgcggaaaatccccggccttccccccgtaaaaggacgataagcgcctcactgtcggctgccatcacgcatgcattttccaattcccggagcatttgttcattcagcgcgttgtaactgtcaggccggttcagcacaatctctgcgatctttcccttttcttcataacgaatatactgcatgtttacatcccccttgaatccgcttacatattttgttcaaatgatatattccttcccccgaagcgaaactcctttatttttcaaggtcaacagatgccgaaaaatgcatatcatttgaaactgaacatacatttttatatagtgaaattgatatacaaaacaaaaggggggaaaaacgccgataatgaaatatgtgatactctgcttattactgagcttttttatggtgctgttccccccttcggatgtcgctcttccttcccaattggtgacagaaacagacagccatgtacaaatttcggtttacccgcaggaaacggattcggcaaagacgccggttcaaaccaaaaccgctccgcaagacctgtcaaaaggatacggtgcgttatcccggatgatctccctgttatctgtcaaacctcttgatcaattcattgattccacaatggaaaggacatgcgccattccgatacaataccagtcaaattacctccggcatcagaccatttctcattgccaatctgtatttacggtgtaaaaacagtatattccggagggattttttatgaatattaaagaaaacgatctgcccggcatcgggaaaaaattcgaaatcgaaacgagaaatcatgaaaaaatgacgatcatcattcatgatgacggcaggcgggaaatttacagatttgatgaccgcgaccctgatgagcttctggcaagcatttcacttgatgatgcggaagcaagacagattgccgcgattatcggcgggatggtgtacaaaccgcaggcgcttgaatcgattgaaatggcgttcagcgatctgattatcgaatggtttaaagttgaaaaaggggcaaaagcggcagggcgtacgctcggcgaactggatgtgcgccaaaactatgacgtgacggtcatcgccatcattaagcatgaccagaaaaagtttttaaacccgggcgctgattcgctccttgaaacaaacgatacactcgtcctctcaggtgaaagaaagcatctgaaaaagctgatccaagacttcctctccagagacggagtgtgatctgtttatggaccatctcgtatttgaagtcggtacggcattagttcttgtggccattgcgagtgtcatcgccaataaaattaaattctcgatcatccccttcctgatcattttaggaatgctcgtcgggccgcacgcgccccaagcgggcatcattgacctgacgtttatcgaaagccgggaagtgattgaatttttcgggcggatgggcgtcctgttcctcctcttttacctcgggcttgaattctcggtcggaaaattagtcaaatccggacgttcaatcgccgccggcggaacgatttatattctgattaatttcagtttagggctgatctacggctttatcacgggcttttcctttttggaagtgcttgtattggcgggcgtcatcacgatatcatcaagcgccattgtcgcaaaggtgcttgtggacttaaagcgcacggccaatccggaaacggagctgattctcggcatcattatgtttgaggatatctttctggcggtttacttgtccgtcgtttccgggcttgttctgggagacgcgacgtctgtcggaggcgcgctgatgtcaatcgtgatcgctttcggatatatgctgctgtttttcattgccgcccgaaaattgccgcctctcctgaacaagctgcttgatatccgttcaaacgaggtatttgtcatcgtcattttcgccgcgctctttttcattgccggcttttccgaaacgattcatgtcgctgaagcgatcggcgcgctcttgctcggactcgtattttcggagacggcccattctgacaggattgagcaccttgtcgtgccgttccgtgactttttcggagccatgtttttcttcagtttcggtctcagcattgatccgttttcactcggagatgcggtatggctcgccctcggcgccgttctgctgacgattgccggaaactttatcgccggcatgatcgccgggcgccgggcggggctttctcataaagcatcgtccaatatcgggctgaccattgtgtcccgcggcgaattctccattatcgtcgcaaatctcggcatcgccggcggcctgtccgcttcacttaaacctttcgccgccttatatgttctgatactggccatcttcggccctttgctcacgaaagaatcgaagcggatatatctcctgttgaacagcgtgttcaaatggaagacgcctgaaaagaagccgcagaaatcataaaaaaaagctgacctcttcataagaggtcagtttttttgagcgggaagaaattgctgaaaagccgtttttttattaatggagaaatgctcttttcccagaatggtattgatgattttttgatttctgtaaacagacagcttcaaattcgtagcgcccgttccgtgagcatgatcaagattcgttaatgtgaaaaaatgatgccgcctgtcgtccttaaagacaagacgggaatctgccgtcactttaaaccgtttctcatcctcccattcgatatcgggggcaattgccgtaaaccattccggaatatgaggtttaaaaccggtcgccaatatcactttttctgaatcggccgtaaaggtttcatccatctgccattgatgaaagctcagtacgcagcgcccgttttgcttttcaattttttcaagctccgccatcggctgaatatacacgtcaggcgaacctccgctgatcgatctgtgatacagggcatcgtaaatggcggcaagtgtgtcagaatcaatgccgtggcgcagtccgtccagctcagggagtgtgttcagccgttctttaaaaggcaggcggttaaaatattccacataatcaggtgtaaacatttcctgcccgagcttggcggtttccaattctcgaaatccggcggagcgtgtcacccattgcagccggctgcggcggtattgttcatcgtgcaataagtcagaaaagatctccgcggcgctctgtccggaaccgaccactgtaattgattcggcgccggcgagctcgtctttccgaaacaaatattccgtgctgaccatcgtgtcctgacgcgcttcgtcagcaatctctgcgggaataagcggctcagaccccgtccccatgacgaaatgcttcgtttgatagacactgatgcttccgtcctcaatgttcttgacgctgacgtcataatggtcgccggcatttttcacaccgattacctctgagccgaaacggcatgatttgatttctgaagccgcccagctcaaatagtcgttaaattcccgtctcggaatatcaaattcattaaacgtataaaaccggtacagccggtcatgttcatggagaaagtttaaaaacgtgtagcggcttttcggatcggcgagcgtgaccaggtccgccagaaacgccacctgtaaatccgtccctttaattaatagaccgggatgccacgcaaattctttctttttatcgaaaaaaagagcgtctgttccgggtatatcctctaacaatgcggcaagccctaaattaaacggcccgattcccgctcctatgacatcatacatattatgcacctcttacgaataacagtctaatggtcttttcccgtttttgcagacggttaaacataaaaaaacggcacgctgattccgtgccgtttttgatattataatgcagatttgacgaacatctcatctaagtatttgattttctcttctgtataatgctcgaatcggtcattatatgatttcggatctttcggattggcgaagtgcgtgatttttccggtttccggatgaatgaatttgcttgccgcgccgcagccgataccgataatcgtctgcacttcttccataatcataatgttgtagatgctttcctgaccagggaaagagtagccgacattttcaaggttaccgagaatgtttttctgccggtacaggtagtacggcgtatagccgtgctcttttgtccagcggacggcgtcatccatcatgcgggacacttcctgtctgtcggcaaccttatacttatgcttgtttctcgtcatttctgacgcccgtttaaaagaaagcgtatgaacggtcaaagattcaggcatcagcttttccgtttcctcaagactgttcctgaactcagccgtcccttctcccggcaggccgatgatcaggtccatgttgatgttattcatgccgtgtttgcgggaaagatgatatttttcgatggtttcttcaactgtatggtgtctgccgatggccttaagcgtttcgttttcataagattgcgggttaatgctgattctgtcaatcttatacttatttaaaacggccagcttttcctccgtaatcgtgtcgggacggccagcttcaacggtaatctccctgatattcgcgacatccgggaaagagcggaccatttcttcatataaaagatccatttcttctgcggtaatgcttgtcggcgtgccgccgccgaaataaatggtcgtcactttgatatcatgccgcttcagccattctccgattttctgcatttcatagtgaagcccccataaaaaggagccgactcttcccgcctgtccttgaatggcataagccggaaacgtgcagtaggcgcatttcgtcgggcagaacgggatgccgatatatatgctgacttcatctttgacgcggtacagatcgggaaccgcagcgagctggcggtcgacgatctcctgcatcagattgattttttcatcatggatcagataatcttttttcagatcggcgtgcgcctcttcttttgtcaggccgctctgcagctttttatgaagaagtttagtaggcctgatgccggttaagattccccatttttgtgtcatgcccgtatgcgattgaagaagatttaagtagacgtacgacagcgtgtttttcacctgtttaaatacttctttttcgctccatccggcaagaagcggtttcgtatgatgttccttttcgccggttcctttgatttctccggataccgacacgctgtctgcatcttgagaaatggcaagtgagatgacgagatcagagggctcctccgtttcgccgtacgcaagaacacactcttcaaaaaacaaattcgcgatgttttgcagcggacgatgcagcctgtcatccgtgatgccgtctatttttatttgcaatgtgatcaccttatttttcagattcaaaactttctttagtgtacagaaagaacaggctaaaatcaatccgcgaaaaagccgcagaccggcgtttcgcgtctgcggctcttgattacggccgtttcatatggaacttatcgagaaagcctttgcggtgctgcatgcggaaatattccttaatcatataggcgactccctgttcatcatttgaccttgtcacccagtccgcttttctttttaattcatttgaggcatttcccatcgcgacgccgagaccggccagctcgatcatcggcagatcatcttcctgatggccgatagccacaacctcttccattgaaagcccgagatcagcggcgaccatcgaaagtccgctttcttttgaaacccctttaggcacgatgttcagtttttctccgttgacgcggatcacatcgacggccgggaatgctttcattatcgtatccgttatatcagcctgcagaccatcttcggcatgcacttcaatgacgggtgctgaaaccggctcatcaaggagcaggtcacttaatgattcgacaaactgcaccggataaaaaatcgggtcagacggatgaatcatcgttttcccgaccagattggagttcactttcttcttgtttccgatcgaatatttttcgtgaagaagccggatattgcatggatagctttccagcacctgaacaatattaaacgtgtgatcttctgatattttcttttcaaaaaacggctcatctattttttcagaaatgtatgcgccgctgtgggtaatcaatttcgcattcagctttaatattttcgccactttttgagcggagcgaaaatggcggtttgtgaccagtgtgacgtaaattccttttttcttgacgtattcgatggcatcctttgtcgtctgatgaagtttgccgttggagcgaagaagcgctccgtctatatttaacgccagcatttgttttgacacagagaagtccccctccttgatgactgtacttgtcattaggatatgaccctgtctctttgtttagaacaaccttttctccgcagcaaaaaagcctgcctcaagcagactttgaactgtcgttttgttgggatacgatcgatttgctgccttctccccaatgtgtatttctatttacgaaatatatcaggaaccccttatttgaccgttgatgcgctcgttcacttactctctgttgctaccccttaacataccaggcagtataggcgaccgtatccttagatcatctgtaagtgtaggcgctttcagagttattatctcaattatattgttaaaaaacaagggtttttttaactaaaaaaattagaggaaatatctgtgctgaatgtatgataaagttgaaagggaacatacattctcatataataaaagaaaaaaagcggtgaactgtcatgtctctattaaaagatatttataacgaagaatttgcagaagcacttctgaacagaatcaaatcggcgtatccggcttttgagcgggacaagtgccgggcgctgatgtttcaggaagattggcccggactgacgttaaaacagcggatgcgccggatcacagactctttatatgaaacactgccgaaggattacatacgggcgcttgacgtcttatatgagacagctccccacttctcagggctcgccgggattatttttcccgattatgtccaacagtacggaacggatcactgggacgaatccatgaaggcgcttcagtatttgactcgtttttccacttccgaatttgcggtccgcccgtatatcaggcttgaccgggagcggatgttcaaagagttcctttcctggacggagcatccggacgaacatgtcagaaggcttgccagcgaaggctcaagaccgcgcctgccatggggaatctccattccggctcttcttgaagatccttctccgattctccctgttctggaccgcttgatgcaggatgactcgttatatgtcagaaaaagcgtggcgaataacctgaatgacatctccaaaacacatccggatcttctggcacagatcgcagccgagcggttcggaagctgtccgcacacggactggattttgaagcacgcctgcaggacactgttaaaaagaggagacaaacaggcacttgcggttttcgggtttgaagacgccacccggatttcattggaacgttttacactgaattcggaaacggccgccatcggaacaagcatacatttttcttttcagatccgctcatctgcccggcaaaaagtcagggttgaatacgcgattgattttgtaaagaaaagggggcaccgcagccgcaaggtgtttaaggtgtcggagtccgccatggataacggagacgtaaaagccttcagcaaacatcattcccttaaagatttaaccacccgcaagcattatcggggaattcacactctgtctgtcatcattaacggaacggtaaaaggttcgcttgatttttctgttgaataaaaaaacccctccatttcatagatggaggggtttggagcttattccgggctgccgtaaagctcttcaagaggtttcataatgattttgtttaactcgccgatcagcatgctcatgcgctgttccgcttccatcagctgagaaatcaattcatgctgctgtacgagagcaaccgttttttgtgcctgctctacctcttcctgagtgatttcttcacctgacatctgtttctgctgcagctgcagctgtacattgcggaagttatcaaacatgcgttttgcggattcatctgcgtttacttgatcataaagccctctcagacggctgtattcatcactgtttcgcaaagctttttcaagatcatatgctgcatcataaaaatgaactgccataataaccgctcctttcttcctttcggacataccactccactataacagactgcggagcgactttcatcatcggcgtatgttttccttagaaaagaatgacaaacaaagcctgaattgctccgattatcccgccgagcaaaccgcctaaatacgttatcatcttaaattctctcttggaaatcgacagcaccatttcctccagccgttcaacgggaaactgatcaacctgctctttgaccacttcctcaagacgcagccgtttcagcacatcctccaaatgagcggcaatactgccgagtgccgcatcaagcagcttcggcgcgtacgttcccgtaatctccccttcataacgggagatgatgtcaccgagccggcattcgaaaaagggcgcggtttgaagtgcggccaaagcccgctttttcatgctgaacagcagatctttcgcattccacttttcatcggcctcataaagtgtataagatttgagcttgccccattcttgagaaagcagatcagccagaagctttttcgtttcctcattgcgcaaaaactttaacagctcaggcagcacacggtctgccaagcttgaattgccgaggaacatctgcaccatgctgccgagcatcccccgggaattcaaaaagtcgtcaatcatatttccgagcctgtctttcccttcttcgctctcaaaataatcaatgctccgcttcagaatataatctgcggccagcgggactttttcatccagcttttcctgaagctcatcaggaagccagtcttttatggcgcggtgctcatatttccggtacagttccgaaagcttttcatcggtaaaacggtcaatccaggcatccgtcttttcctgcggattcccgatgcccgcggcagccaaagcttcatgcaccgtcatttcggaagcggccattttttgcgtgaattgttcggcgaaaagaagcgcctggtttttaacggtatctgataaaagccgcttttttattccttccggggttaaaagatggttcgtcaccatgagccccatttgttttgccaattcatcccgtcttttcgggatcagccccggcgtaaatggaacccgttttccgaacaggtaatacggccggtacggacgaaataacatctgaatggcaagatgattcgtcaccgcgccgatcgcggctccgatcacaatcataaatagaaacgttcctgctatgcccattccttttcttctgcctccatcttatgttctattttcttgatgatatatctattcgtattatagaggctggcgggcatgcgggcaaatgaagaacctgaattgttgtttgtgaggaataaggcaagatgctgtttcgtactctttacagtagatcatcttttatgatgcgcttagcatatttattggatggaagggccgttccatcagcggctttttgaataaagggggagtaataatatgacaacactcggttttatgtctgtatcccgccggcacgaggaagattacgccggggaattggctgaaagagcgcctcaatataatgtgcgcttagcccgctttacaccgtttgatatatttccagattctttgcgcgtgaaagcgctcgtctatcacccgcaaagcggaaagtggaacgaaacggaaatcgatattcccgaatatatttacgaccgctgtttttacggaaaatccgctgaagcgcaaaaagccaaaccgatcgtcgaatggctgaaaaaatatcggaaaacggaatttatcggccgggggcttcctgataaatggacggtcacggatgcgctccaaaagcatcatctgatcagtccctatattcctgaaacggccgaagtcagccgctatgaacaggtgcaatcatacttagccaaggaaaaagcatgtatacttaagcccgctttcggcgcgggaggcagaggcatcatcctgcttgaaacaggcaaaaaatcaattacggccacttactatatcggaaaaaacaaacaaacaaaatcattttccaatcacgtgtcttttaagtcttggtgcaaaaaagtgctgcagcaccgctatttgcttcaatcctacttaaatatccaggataaagagcggcatccgtgcgacatccgcattttcatgcgcaaaacggagtcaggcgtttgggaaacggtcggaaaagcggtcagaaggggttatcagaacggtcttttatctcatttgcccggaggatcagaaccgattaagtttgacacatggtttgaggaaattccgagaaagcagcaggccgttttattggatgatgtcttttcgatcacccaatccgtcccttatttccttgacgaacggttcgggccgctgtttgagctggggctcgatatttgttatgccaaagacggacgcatctggcttttggatgtcaactcaaagccgggacggaaagctattttaagcgtggttccggaggcgaaagaggatttgtatacgggtccgctgagacgcttccgcgaacttcagtcacaggaaagccggaaaggggtattaccgcgtgaatcataaagggatgattgtcggcatagataaaaaaagcaaaaatacgctgtttctcccctcctccatgaaacgggaagggcttttatccgctgccttcgggaccaaggttgtcaaatgccgtgtagccttttctcaatcacttgaaaaaagcgcgctcctttctgaagatttgtttgaggagctgttgataccgcataaaagccgggctgactttctcatacacggccagacggtgcacatcggaccgctgatcggcgttttcacagccgggttcacatcatcgccatcccgcccattaagagaccgtacagccttcttttccaagatgctctctcttcatgaacaggcgaacggatattgtttcgttttcggggcccatcagatcaactgggaagaaggcaccgtccaagcgctgatttataaagaaaacagctggaaacggacggccgtcccgcttccgaatgtcgtatatgacaggctccccagccgaaaaacagaagaagttccgcttttacagcagacaaaacagaggctgatgaatgactatcagattccgtggtttaatccgcaattctttaataagtgggacattcataagcttctggaaaaaaacagtctcaccgcttcactactgccaaaatctgtcctgcacccgaatgcggaagcgttagagacgttatgcagcacgtttgacaccgtctatatcaaacctgcagacggcgcactcggcacggggatttacaaggtggaaaaaacagatgccggcttatctgtcaaacacacgaatgaggaaaaaacggtggtgacggcagagtattcagatgcggcatccttcatgacatcatttaaagaaaacaatgacccgtccgcatttttaattcagcaaggcattgacctgatccggctggatgggcgccccgtcgatttcagggtgcacacgaataaaaacgccgaggggaaatggacagtgacggccattgcggcaaaaatttccggtgaaaacagcatcacgacgcatctggcaaccggcggagaagtcatgacgttagctgaattatacggcgatccgcgcgagagagtcggcatgatgcggaaactttcaaaagccgccttggcggtcagccacgtgttaaatgagcacattgaaggttttatcggcgaaatcggttttgacctcggcgtcgatcattcagggaaagtttggatgtttgaagccaattcccgccccgggcgcagcattttttcccatccgaagctgagatcggtcgattacctgacaaaacggagaaattttgaatacgcgtcgtatttatcagaacggtccatcaccgccccggaaaaactttggcggtgaggctgtctttttttaggtttacccgggacaggcaatgaacgatgagctacaatgaacaagatcaacatttcccataaggagcgtgaacgtcatgatttcgcacttcagctggaaaccgttattcaaaaaagagaaactgcccggatggcggatttcattttactggcagggtacgcattacgaagggatttaccataagtccggagacattgaatggggacacacacatccgggaaaagaagagccggctctcgtaaaagagctgcatgaattaatgctttatcacatatatgactgaaagctaaaagctcagccgcaccaggctgggcttttctttttccttccgctatttaccacaccgttttccgaatgagatgccgtttgattcaccataatacgtagtacaaagcggcaaacagcattgggtgaagccgagctggcaatggttttcattccgaaaaccatcggctggtgcaattccagcaaacccaaccatactactttataaaggagatcatacaaatggcaaacaacaactcttcaaaccaactagtagtacccggcgctgctcaagcaatcgaccaaatgaaatacgaaattgcttctgagttcggcgtaaaccttggcggagaaacaacttctcgtgcaaacggttctgtcggaggagaaatcactaaacgtttagtatctttcgcacagcagaacatgggcggccaaggcgtacaataactcaataaatggcttacagaaggcgcgggataccgcgtcttcttttatgccgtcacccttttttcctattccacataccctaggaaaaaaggagggaaaacatgtcattcattgcctcagtcaattgggagctgtttcagttcgtaagtgtttctttggtcaatgaatatgttgcccaccatttcccgtttattcacaggtattcttttccccgctgctttgaatgatataatgagcggcgaggaggttttttacatgaacatcgctttactcggagcaacgggaagagtaggacaggcttttataaaagaagcgcagaaacatggacatatggagatattcgctcttgtcagatcagccggaacagtccttcttcccattcctgaaaaacaaatcataacagggaatgcgaggcggcgggaagatgtaagccgattgatttccaaagcggacacagtcgtgagctgtctcggcacggacagtgacgataccctttcagccgctatgacccatataatagacagcatgaaatggcatcatgttcagcgtctgattacgatcggaaccgcgggtatccttcagtcacggcttatgcctgatcaataccgttttgaatcggcagaatcaaaacgaaaatcaacaagagccgcaaaggaacacgcccgcgtatacgagatgctgctggcagaggatcttgactggacgatcatctgtcccacctaccttcctgacggagatgctgccggagtttaccggttcgaacaggatcgccttcctgaagacggcgctgaaatcaccgtcggagacacggcgcattttctgtaccgtgagctgatcagccctcagtttgtcagaaaacgggtgggactggcttactgaatgaaaaaaagggcgaatctttagattcaccctttccgattacaccgcggacttcgcagttcctttctgcaattcatacatttggtggtactgccccttttgcgccattaattcgtcatggcttcccttttcaatgatgcggcccttttccagcacgagaatctggtcggcgtgtctgatcgtggaaagccgatgggcgataataaatgtcgtgcgcccttcttgaaccacttgcagcgctttttgaatgactgcttctgtttcggtgtcaatgtgcgccgtcgcctcatccaaaattaaaatggccggatcgaacacaagcgctcttgcaaaagaaatcagctgacgctggcctgaggacagggtgccgcctttttcggtgacgggctctctgatgcccttcggcaaagattgcagaaggcttgcggcgccgacttggcgaagcgcttcttccgcctgctccagagaaatacgctgatcatcgagtgttacattggagccgatcgtgcccgagaaaagatacgggtcttgcagcacaatgcccatatgcgacctcagctcctgccttgacatgccgtatatgctctgaccatccagcagaatatcccctttttgagcatcataaaaacggaacagaagattcaggatggagcttttgccggaccccgtatggccgacgagggcgaccgtctcccctttttcagctgtaaagctgatgtgtttcagcacctcttctccctttcgatatccaaaagaaacatcgcggaattccactgttcctttcgcctttctgtctgcgggagcgccttcttcttccgtttcctcctcctgtaaaagctcgaataccctggcggcagagacacgggccaattcaagctttgaaaattggttgacaatccccgtaaccggctggaacaaacggtttaaataatcaacaaatgcatataaaacaccgattgaaacaattccggccgcactcagactcgcgcccccgaaataccagatcagcccgacaaacgccagattgcgcaacacattgacaagactgtgggacatgagggaatttaaggacagcattttgtttttgtagcggaaatgagcttcattcaattcttcaaattccttcatcgtttccttctctcggcggaacgcctgaataatcggcatcccttgaatggactcgttcattttcgcattgatgtcactgttaatggaacggattttttggttgaagacggatgcgtatttgcggtagacaaccgaccagatcattaaaatcggaataatcagcaggcaaacggcggccagcctgacgtcaagcataaacagcgccgtaaaaatgccgagcatataaacgccgcttgtgataaatgtcgacagcaccgttacatataaatccctgaccgcttctgtgtcattcgtaatgcgggccacgacttttccggcaggcagattatcaaagtagcggatcggcattttctgaatgtgtgaaaatacatcctgcctcatgcgctgtatgatccggttcgctcccatctgcagcagataatgctggccgtaatgaaaacatacggaaaacatgagcagtcccgcgtaaatggcggtcaacgtcagcaatccttttatttcgggacggtaaaattgaaaaatctcctgtcttgataacgtaatggcgggatatgacctgctttctttaccgtttgatatcgtcagccggccgtcagacactgaacggtttccgtcaaaactgacgggacggtcaacaaaatagtagcccgcaccgacttgataaatgtgcgcctctccggttttgtccgcccccgatttgagccggtcctccctgacataatcatgcccccggaacctgacggcgcccggatcgtccgcagaggctttaacccatgttttttcaatgccgagaatgtggtcgtcaatcattttttttccgataaacgggccggtcagctcagtgccgaccgcaataatgagcaggacgaccgcccatatcagcagcttcttatattgaagcgcgtaattccataatcttctcccggtcttcatgcgcccgtccccccttcttcaagagaggacagctgctgcctctcatattgttttcgataccagccgttatgcgccaatagctcccggtgcgtgcctctttcagacacccggccttcatccatgacgagaatgagatctgcgtgttcaactgccgagagccgatgggtggtgataatcgttgttttatgccgccgttttttacggatgctgtcaatgatggcggcttccgttttcgcgtctacggcagaaagcgaatcatctaatatgagaatgtccggatcggtcaaaagcgctctcgcaattgagatgcgctgcttttgtccgccagagagcgctacgcccttctcgccgacaagcgtctcaagcccgtcggaaagcataccgatatcgttttcaaaatgcgcatctttcagcgcgctgccgatttcctcttcgtttgcatcctgccggccgtaaagcaggttctcttttacagtctttgaaaataaaatatgatcctgcggcacatagccgatccacccgcggagctcctcgagcggaatctcctgaatcggaacgcctgtaaacgtgattgctcccgcaccgggcggatattcacgcaacagctgcttaataatcgtcgtctttccgcttcccgtcttcccgacgatgccgagcgtctgccctttttctacggaaaaagatacatcagaaaccgccgggcccgctccgctcggatacgtgaaagtcacttgttcaaaaacaagacgcccgggctccttgatgccggcggggtgctttggtgccgtcacgtcaggctcataggaaagcgtctcattcacacgatccaaggaagcatttccgcgctgcatgatattgattaattctccgatcgcaaacatcggccagatcatcattccgaggtacacgttaaacgataccagctctcccagcgtcagccggttttgaaaaacgagataagcgccgtagccgagaccgatgagatagctgaggccgacgagaagtttcacagtcggttcaaaaagtgaatcgataaacgccaccttcatatttttctcatatacatccgccgtcatatcaccgaaccggctgacatcatttttttcctgtacgaaagcccggatgacccggacgccggataccgactccagcaccttgtcatttaatgatccgaaagcatcctgcgcttccgtaaaccgctcatggatcttttttccgtacaggctgaccgcagccgccattatcggcagcggaataatcgcggcaaatgtcagcttccagctgatgagaagccccattgtcaaaaatatcgtcagcatatacatcgtcgaatcaacgagcgttaagaccccgaagcccgtcgtcatactgacggcctgcaagtcatttgtcccccgcgccattaaatcgcccgttctgtatttctcataaaacggcggtgacatttgaagaagccttcccatcagctttgaacggagaatcttctccatgacattcgccccgccgaaaagctgatacatccaaaaataagacagtaaatagacggctgccgttaatgcgagaaaaacacatatgtaaaacagcatcccgctttttgtaaacacgcccgccttcatatcgtctatcgcgttaccgagaagtttaggcggaaacatttcaatgacattcacaatcaataacagaacaatcgctgtcgtatagcgcagccaataggctttaaaaaaccacgcgagcttttttaatacagtaaacaaataccgtcatcccctttcatcaatcagccgccctcaagcttttccggattgtttttcattgttttcgctaataccgccacatgcatcacacctgtctttctttcatttttttgtataaaaaaagacatgaagcctcagctccatgcctcttattattataaataaggtacagacccgccgtttatgcgcgactgccccgtttttaagcaaatgttcagaaaacggaagctgtatgggagtcacgccggtattcagctgaagatgagttgacaagcattagttttgacatgatccatacctccttttcccctagattgttccttcatcatataaacaaatcctttttttgtcaatgcaggttttacatttctgccattcgggtattgtaaaacaaaccttttttactgaaaggatgaggccgatgtttcacgcggaccggttgatagcagcttttgacggaagtgatgatagtaaaaaagcgctccaaaaagccatagacctttcaaaaacatttcacgcagatttaacggtcgtacattcccacaatgcaaaagatacccggacgattgttgatcccccgaggccgggagccggggcaacgtatatcggcggcgggattgcaagcgttcctgacccgctccaggcggaaagaatctcccctgatccgatgatttatgaagaccgtacggaagaaatcgttgcggaagcgagaatgctgatgaacgacagccagattgacggggatatcgacattttagaaggtgatcccgctgatgccattatcgagcatgccgaccgtatatcggcggatttgatcgtcatggggagccgggaccagaacaggctgaaaaaacttttattcggaagtgtcagtgaaaaactgtcatcgaaatccgatattcccgtgctgatcgtaaaataattctttctgtaaagcagcttaatcaaaagctgctttttttacagctcccggctgtttcttctttttttcggcatcacaaaaaaactcgccatgatcaaaaaatcgatgcacaatacgacagaccagccctttaacagtacgctgagcgcttcggtgcgggaagcgtcctgaatgagaaataccgttccggctaaaagaacgccgccgatgacaaatgctaatacatgtcttccccatcctttcgcataatgtttggcataatccagtccgtaccgtttgaccggttttgccccttccttgaccacataatagcggaaccgctcatccgcccattgaatcatgcttttcccgaaggcgacagacactccgatataaatggccgccaccgcatgcgccatagtcgccgccgcccctctgtataaatcagctgcagccgccagaaacagtacggcatccaataaaggaatgagagcgaaaaaaaacattccgagcttttgccgcctgaatatatagcgcgccgccaatccaaagatgacagccgcccaaaaagcagcctcacaaatgacaatcaaccaagcaatcgcgttcaatccggttcccccttatcgttttctaaaatgcattgtatcactgctttttatttaatacaactgtattacaaaattgcaagaaaaaatatttcctgttacactggaaccatgcctaaaataatcgatcatgaaaaaagaagaaaacaaatagccgaagccacttggcggacgattttggagcggggaatggaaggagcgacagtgagaaacatcgcccaagaagcgggtctttctttaggcgcgctgaggcactatttcaccacccaggatgagcttttagggtatgcgatgacactcgtaaaagaaaaagcggccgccagaattaacgaagttgccatgaaagatctgccgccgaaagaaaaagcggtgcgtctgatgcttgaaatcatcccgacagatgaagaaacgatggctgaaatggaggtatggttcgctttcacagcttatgccagacataagggagaagagtttcaaccccagcaggacgggatcttggcatatatccgcggtctgattgactggctggatgaaaataagcttctgaaaccgaatcttgataaagagatcgaagcggagaaaatgtacgccatcgccgacggattggcgctgcatgccatgcttgaacctgagcgtctttcaaaagagaagatctcccgtgtgctcgttcagcatatcgaatctctttttatctgactgaagcaaaaaggccggatgtgttccggccttttttcagcttatgactgaacgccgagctcctgctgaatgtgcgactgaaaagcctcctgaatcgttttggctacaggtcccggcactccgcttccgacccgttttccgtcaagggttacgatcgggattagttcagccgtcgttgacgagatgaaaatttcatccgcatccctgagttcgtcttcggtaagagccttctcccgcacctcaatcccgttttctttcatcagctctaacagtttcatccgcgtaatgccgtttaaaatcagctcatttgcaggatgcgtccggacagtgccgtttatgacggcgtatacattggaagaggttccttccgtgaccgctccgtcccttatcagcaccgcttcataagcgcctgcttcataggctttttgtttaatcatcacattatacagtaaattcagactcttaatgtcacacctcagccagcgtttgtcctccgccgttatggcctgcgctccggctttttgttcattttccggttttttcactgaaaaggtgtatgccgtcgtctgcggttccaatccttcgtcatactggtgcttccgcggcgccttccctctcgtcgtctgtatatagaccccgccgtcaatgagtttgttttcctgtacgagcttttgcagatcccattctatgtcctctgcggagaaaggcagggtgatgccgatttctgcggcgcttctgaaaagacggtcaatatgctcgcgcagaccgaataaggcgccgttgtacactctgatgacctcatacacaccgtcaccgaattgatatccgcggtcctcaatatcaactgccgcttcttcacgatcaatcaactggccgtttactaatgtcttcatgtaaaccctcctcatcgttatctgccgtgatgtgcattctcagctgttattgtcaactattctatcatactgaacgagccggctgcggagtttatttttttcttaaaatcttattattcgacatcttttctatgtcttttccagttttgttcctgtatacttgattcgacatacatatgctgttaacttatggcacttcgcaagcctccgctgttatcggcattatgcagaaacttatgctactggagagattgttatgcgcaacacaaaagaaggtgcttccccttctctgttttcattggcttttaaacttacgagtttagcagttttgtgcggactgcttctggtaatcgtcataatgggatattccgcttccgccgcaaaaaacaaacaggtcaccgtgactgcaaacgggcagcttcgggatgaagcagaaagcctgcggctgaaaaatgattctcccgacgtcttaatgaaacacttgcagagagagcgtgacccagggaaaaaaacggtatatttaaccttcgacgacgggccgtctccatatactgaacagctgttgaatgtattgaaggcaaatggcgcaaaggccactttttttatgcttgaaccgcggatgaaagcctatcagcattccgtgcaaagagcgaagcaggaaggaatcgcgctcggcctgcacggcgtgacgcacgataatcacctgttttatcaaacaccgacatcaccgctgaacgaaatgcagcagggacgcgatacactcgaggcaatcaccggagtaaaaacggatcttgtccgcacgccttacggcagtaaaccgtcattgacggatgcccaaattaagaatctcgaaaaaggcggattcgtgtactgggactggacgatagacagtgaagactggaagtacaaaaacgcacggtacgtgccggaagtattgaatcagctcgcatatttggaaagcgttcatacgagcaggccgcatgtcattttaatgcacgatctgcctgcgacggtgcacgctttgcctagcctgatccaaaaactgaaagcccagggctactcctttgatgttctgacggatcaaatgattcccgtccatgaataagaaaagccggatctgtatatgatccggctttttttatgtcgcggcgctgatccgttttgcaaattcaccgatcttctcatggatgacaaggtcaaataaatggtcgcaatatgtcggctcaaggttaataatcacctgcttcaaaccgggaatccggcccgcatcctcagggacaaaccttgccggcgccacttcaagcgaagtgccgatcacaagaagaagatcagctttatcaagcttttcataaagggtttcaaaatgctgaacgagatcgccgaacagcacgacatccgtctttaatacggtgccgcataccgcatgattaccgatttccgccgtacattccggcacttcgtccttcagcagatgagaaagcccgtagcgcgctccgcagcgggggcatgcggcggtctgaattgaaccgtgaagctcatagacactgctgcttcccgctttcttatgcagcccgtcaatattctgcgtgaaaatgtctacctgctttccccgcttttcaagatccgccaaatacgtatggccggcattcggctcataacttccgctcattttcatctgaaagagctgtttgaatttaggccagaattcacgcggacggcgttcaaagtattccctgctcatcgcttccattctggaggagtcttcggtccatataccgcccgccgaacgaaaatcgggaatgccggattccgtgctcattcccgctcccgtcagcaccacgatacgttccgcctgattgatcaatgtcataaacgcttccactcttccaccgccttttctttttatcatatcatgaaaaaagaacggcgcctgttatgcccgttctttttctccggaatgatccttcacatgaaccggatcatcgtggcttttctgttttacgaatacattctggcccggataagcgaactccacgccttcctcagcaaaaatatcaataatccggcggttgatatcctgccgcacgtccaggctttccgcccagacgatggtctttgtgtaaaagttgaaaaacagattgtaatagctgtccgcaaacacgtcaaagttaaccataatcgtatcatcatgcacgccttcatgttcacgaagcatttctctgagccttgtgatgcaccgctctagacgatcaatcggcgtcgcataagaaacacgaacggaaaacgtgacctggcgcttcgtcatcctcgtccagtttgtgatggcttccatggaaagcgttgaattgggcacggtaacaagcgccccctgcgccgtgcggaaccttgtgcttcggaatgtgatatcttcaacgccccccgtcacagatgacgtctcgacccagtcgccgatcgtaaacggcttttccgtaatgatgataatgccgccgaaaaaattgctgatcgtatctttagccgcaagcgcgaaggccaatccgccaagtccgagtccggccacaaacccgtttacatcataattgaattcctgcgcgatcacactgacgctgagcgcgagaatgacaaagcgcagcaccttggataaaaacggcgccaaaatgtcatccatatcaagctcaaagcgctggttgactttatgaaataaaaacgaagacgccgatgtcagattgcaaagcccccaggcaatcagcgcaacgatcagagagcggtacaattttttgacaatgtccatctgcccgtctaaaaacggcgaatactcaatcgccaaaaacagacccagcgccgcgaaaaaccatctggccggcttgtcaaacgctacggcaatctgcttgaatatgtcggttttcggcttgttcgccaatttgtaaatgagctgaaaaaagtatttgacaaacagttttctcaaaacgagaaaagccgctaaaattccgatgctgatactgatctgcgaaatatggtcaagcgtaaaaaagctctgaaattgtgtcatcatggcatatgctcctttgtcttgtcgaaaatctattatactaaaacattcggacatcagcttcttttaatgtctaggcagcctgaaaaaccccggcatcagagcacagccggggttttcacacattcgttcatctttcagccagatacaacagggtcaggcactatttcttctttgattgtgtctgtttcaggagagtcgctttttggatttcagcatcggtttcggccttaattctttcttccactttcaatctcccttttcccatgatctcgcctcctttttgccattataaatcatcaatgcggattgtaaaccgaaaaaagcactatctttattccaaaaaataccgttttgcacattcaccagtttgaatcgctgtgcatatacgaatctgatataataacagaaatgcccatgaggggagctgacaagcttgtataccatcgctcatcgcggcgcctccggttacgcgcccgaaaatacatttgcggcatttgatatcgctgcagaaatgaacgctgatttcattgagcttgacgtccagctcacaaaagacggtcagattgtcgtcatccatgatgacaaagtcgaccggacgacggacggctccggttttgtaaaagattttacgctgaagaagctgcagtccctggatgccggcagctggtatggggctgagtttaaaggggagcggattcccctgctcgaagaggttctgaagcgttatcattctgaaatcggatttttaattgaactgaaggggcacgtttctcaagtcggtcttgaaaaagcagtcggccagctgttaagcaggttttccttttccatccaccctatcgttcaatcattcagcctcaagtcgattcagacctttcacggcatgtatccgtccgttccgactgcaattattgcaagacccagctttgggatgttttccaaaaaccagctgaacgcctacaaatcagccgtaaattatgtcaatattaaatatacccgtctgaatcggttcttgatttccaccgctcacagacacggcctgaaagtatttgcctggacggtcagaaatcaaaagacggccgaaaagctgcaaatgatggcagttgacggcattgtaactgattttccggattttatttctaaggatggctgatatgaaacaatacatcgcaatttttatcggaggcgcgcttggcgctttgctccgctttgaaatgagcgcgcacattcacagcggttctttcccggcggccactttcctcgaaaacgcggcgggaagccttttactcggtcttattacgggttatttcatcattcgggctaaacgccctcttatgaccgcctttttaggaaccggtttttgcggaggtttcacgacgatgtcaaccttcgcaaaagaaaccatttttctgctgcaatcgtctcccgcagcggctttttgttatgctgccgcgactttattcgctggtcttgcccttgcatacgccggcatttttttgggacggcggattgcccttcacgcagcaggaagggggcatgatacaccatgacgattgtcctgatgcttatcgcagcgggtatcggagcggtattacggtctctgctgggtaaaacaatttcagaaagaacaaaaagttttccgattccgcttggaatggctgcggtcaacctgctcggctccttcggcctcggcatgttcaccggactgggcctggataatccttccgccggcatcatcatcgcgacaggctttttcggtgcgtttacgaccttttccacgttcagtattgaagccgtgcagctgatgatgaacaaccgcataaaggaaagcctgctctacatcgctgtttcagcagccggaagccttttggcgttctggtgcggcttcattatcatttccatttaaaaaaaccttgagcttatttttcgctcaaggttgcgttatgaagcatgaccgtttcaggcacaggcagctggcggtttattgttccctgaccgcccgggcggccctgttcttctttgagttcaagctgtttaataaaccggccgtccatttctaatatgagggcagtgtatcccccgatttgtatcgactcacccgcacagatgtcaatattccgtttcagcacaagaccgccgatcgtgtcgacttcctcttcaatccctgcgccgagaagatgattcacctgatcaatccgaacctttccgtccagcacataatggcgttcggacagcttttgaatctgcggctgttcgtcttcatcaaattcgtctctgatatcgccgacgatttcttcaaggatgtcttcggtcgtcacaagaccggacgttccgccgtattcatcagacaatatcgccaaatgaatccgttctctctgcatttttatcagcaggtcgtgtatcgggatcgtctcgatgacttcaatcaccgggcggacgtaagacgtgatggatacttccgctttttcatcttctgtcataaacagcaaatctgaaaagagatgcttcgtattgatcatgccgatgacactgtctttgtccccgtccgttacgggccagcgcgtatatttgtctttcagcatcatatcaagcatttccggcacgtccatatcagtggaaacagccgcgatttcttttctcgggatcatgatttccttggcgatccgattatcaaaatcaaaaattttattcacaaacgtgtattcagacggattgatttctccgttttttaaactttctgacagcaggatccgcagctcttcttcagagtgggagccttcatgctcagatgccggctttaatccggccaaaccggtcagaattctcgcggagccgttcagcacccaaataaacgggaacatgaacacgtaaaataaccgaagcggtccggcaatccataacgtcagcttttccgctttttgaatcgcaaccgttttaggcgcaagctcaccgacgacgacatgtagaaacgtaatcagactgtacgccgcagcaaaagcaatcacatgctcggctgaatccggcagccccatgccctgaaacacaggatgaagcatccgctcaaatgcaggctctcccagtacgccgagcccgatggatgtgagtgtaatgccaagctgcgaggcggataaatactcatcaagatccgtaatgatacgctttgcgagcaccgcccgtctgttcccttctgagatgagctgatcgattctggatcttctcactctgacgatcgcaaattcactcgccacgaaaaatgccgttaacgcaatgagcacaccgattaaaatcaaactgtcaatatcgtccatttcaccttatcccgaattgaaggataaggacgtcacctcctgatttcatcgttttttcttaagcgagaggaacgaaatgggtgattgactacacagagggccccatcctgccacctcctaagtcaaagcatgattgtaatttgtatattttattgtatcacaactccattctttcatcattttcagatttttttatcatataaaaaacagccttcaaaaagaaggctgccgttatctgcttcggaaatgattttctaaacaaagcgccgtattaatccccccgaatcccatgcttaagcttaacgcatggtgtacggtatgggcgctcggcccgtcggtcacccactgaaatgaatcgtcaatcggctccgttaagtttcggatcggatgaagcttgttttcccgcatttgcaagagagcagcaatgatttcaaccgttccggccgcactcagaccgtgtccggtaatcgattttgtcgcattaatccgcgcgtgcgacaggccgctttcagaaagcgcccggcattcagtcttatcaccgatcggtgaaccggtgccgtgcgggttgatgtaatcgatctcttttgctgaaagaccggcccgctccagcgcctggcggatcaccgtcatttcgccctctgctgaaggattcgggttgcggttcgcatcggaagccatcccccagccctttaagccggcccacgaacgtgcgcccctctcttcggcagattcagcccgttccagcacaatcgccccgcacgcctctccgaatataaacccgtccgtatgccggtcaaacgggcggcaggcggcttcgggccgttcagcgtatgtatcagtgcccatcgctcccaaagaacggagagcatgacactccatgtacgacagatcggccagcgccccgatcacgatacatcggtcaaacaggcctcctttgattccttgagcagcctggataactgccgcctggccgcttgccgacgcgccgccgaccgtaaaggccggcccttttatcccgaattgctccgtacaaagccccgacaaatcactatccataaaagaaagcccgtatgtcggatttacaaattgcggcgttttaccgtttttctcaaaggtctgcagcaattcgcgctgcgtcatattcgagccgccgatgatcagaccggtgcggctatggtcagcgccgtctaattgagcgtcatgccacgcttcatataaagcgataagcgccgtctttcctgataatgcggcccttcggtacaagcgcttggacagcgcgtccggcggcgttaattcgctaagctccgcgccgataaacgaactgcctttctgccggccgggccgtttcatcacatcaaaggcgtgccgcccctccataagcgcatcgagaaacgcctccttgccttgtccgaccgcggttaagactccgattcctgtaatgctgatgtctgacgtgccattatttctcctcgacatttgtccgttctcccatctttatgtattggaagctatgaagaaaaatcttgatacagtgctttgaaaacatcgcgcgactgtctgatctgttctgaaggcacgctgaaagataatcggaaatagccgctttttccaaatccgctgccgggtacgatcaatagtttgtatttctgtgcggcatgcatgcagaacgccacctcgtcttcaatcggtgatttcggaaagacgaaaaagcctcctttcggcatttcaaattcgaagccggcttctgtgaggatgtccaccataaggtctctccgctttctgtaaggttcagcgtcaatcgaaagatcatccattttcgccacggcgcgctgcatcatgaccggagcgttcacaaagccgagcgtccggttgcagaaaacgaacgcatccgtcagaagatcgccctcaggcatttgggcgtctgccgcgatatacccgagcctttcccccgcaatgccgagatctttactgaacgaactgactaaaatcacgcggtgatacgcctgaaacggattcgcctgctcttctccgtagatcagctggctgtacggttcatcaaataaaataaatatgctttggccgttccgctcttcggcttcttttaataaggcgcctaattcgttaaggtttttctggctgagcacagtccccgtaggattatgcggcgtattcacgatcagtcctttcgtacggggggtgatcgcacctttaaccgcttcaatatcaatctcaaatgagtcagtcagcgggcagatgacgggtctgccgcggtaattttcaacatacgctttatattccgcaaaataaggcgaaagaaggatgacttcttcctccgggtttaaaatgctcttcagcgcgacattcagcgccccgccggctccgaccgtcatgactgtatgcctggcggaaatttctgtctggaaccgctctgacaaaaagcgcgcaaccttttctctcgcctccggaagcccctggttttgtatgtacccgtgccgccctgtttcagccgcttcgcaaagcgcttttttaaatgtttcaggcggctccgcaaccggatttcctatcgaaaagtcaaataccttatcggcgccgaactcttttttcagccgagcgccttcatcaaatagtttgcgtatccatgaacctttctccagattctgtgtcacttcccgtgataaaccggccactgtcatctgtcccttctgtctttttcttccgcttctatttacaatgattatgaaagatttacatggcgcagtcaacgctttttcagacagcccgccgcgccgtttcaggagaaagacggaaaacaataaacttgtgcaaactccccttcatatattaaactattctcataactataacgtgatggttggggagggatttagatggggctgagacttatcgcatcagtgaattagcagagcttgccggtgtaacgaaacgcacggtggattactacacaaacctcgggcttttaaagcctgacaggtcttgttcgaactatcgttactacgatacacttgcacttaatcggttaaagtttatagtcgcttgtaaaaagcagcgattggccctgtctgatataaaagatcgactggagaaccagtttccctcttcagccctgcctgacgatattggaaatctggcatcggaaattgatcacatgaatcaaaacatctccgtgatcttgaatcggtttgaaaagcttgaaccagaggagcgcgcccagctgaaaaaaaggctggctcctgaaaagcttgcagtgcttcaatcatttatgctgctgttaagttaaaccattatcttactaacaggaggtgttaccttcatcttcccaaaagaagtgaaggttctaattggacattgtgaatttgattttagtcgcggttttaatcgcgctgacggcatttttcgtagcatctgagtttgcgataatcagaatcagaggctcacgggttgaccagcttatagcagaaggaaataaagccgcaatcggtgtcaaaaaagtgaccacgcatttagatgagtatttatcggcgtgccagctcggcataacattgacttccatcggtcttggtgtcttaggcgaatcaacgattgaacgcttgcttcatccgcttttcacaaagataaacgtaccaagctcattatcacatattatttcatttattctcgcctatgcgatcattacattcttacacgtggtcgtgggagaattggcgccgaaaacagtcgccatccagaaagcggaagccgtttcaatgctgttttcgaaaccgctcatttggttttaccgcatcatgttcccgtttatctggcttctgaacaactccgcccgtcttttaacgaagacgttcggtctggagacggtgtctgaaaatgagcttgcccactctgaagaagagctgcgcatcattttatcggaaagctataaaagcggtgaaatcaaccagtctgaatttaaatatgtgaacaaaatctttgaatttgacgacagacttgcaaaagaaatcatgattccgcgtacggaaatcgtcagtctgccgcatgatatcaaaatttctgaaatgatggacatcattcagattgaaaaatatacccggtaccctgtcgaagagggtgacaaagataatattatcggcgttattaacattaaagaagtgctgaccgcctgcatcagcggcgaagtatcagtcgactcgccgattaccgattttgtcaatccgatcatccatgtgattgagtcggcaccgattcacgatctgcttgtaaaaatgcagaaggaacgggttcatatggcgattctgtcggatgaatacggcggaaccgcggggcttgtcaccgttgaagacattattgaagaaatcgtcggggaaatccgtgatgaatttgatatcgatgaaatcaacgaaatccgtaaactcggcgacggccattacatgcttgacggcaaggtcctgattgatcaagtgaacgaactcctcggcatccatttggaaaatgacgaggtcgacaccatcggcggctggttccttacccagaaatacgacgtcgaacaatacgactcgattatcgaagaaggctgtgaatttatcattaatgaaattgacggccaccatgtcgcatatatcgaagtgaaaaaactggcgtttgatgaactgctggaaaccgccgaacaaaaagaagcataacaaaaaagcttgcgcgtctgatacagacggcaagctttttttcatttacagttgttcaagttttttctcaagctctttaattctggcattcagctcttctgtcatggccgcaagcctctccttcggcgcaagatcggaaaagtcctccaaaaaaatcggctcgccgatgataagccgcatttttccctttttaaacagcgcttttcctgtagacggccctttatatgcggccggaacgagcggcgcttttcccatttgggcgatggtcacggcccctcttttcagcgggacgtcttctgatgttctcgtaccgctcggaaaaatcccgacaatctttccttccttcagaagcttaatcggcgttttaatgctgctcgggcccggattttcacggtcaaccgggaacgcgtgaatcttcttcaaaaaacttccgatccactttttctgaaacagctcttttttcgccatataatgaatctgatggggcaatatcccgacacctagcgtgaggacgtccacccagcccgcatgcgtgcacgcgataacgaatcctttatcagacggaagattctctttattgtacactttcactcctccgcgcagggatagaatgcatttgatggcatttgcacaaaacttatacataacgcacttcctttgttgtaatgatcaaaagtgttctctctctattataacaatattttttattacctggtactaataattatatttttcctccgccgatctctatcttttatgacggattttgggtactatagagaaatggtgtttgatgaggtgaaaatgaatttaagccgtttgcatggaacgtgcaactttaaacctttcttatgcgtgtataacatagaggggagaaaaggcagtgacgatcgatgaaatttaccaaatgtatatgaatgatgtttaccggttcctgctctccatgacaaaagacaagcatctcgctgaagatttgctgcaggaaacctttatgagggcatacatacacattcactcctacgaccacagcaaagtaaagccatggctttttcaagtggcgagaaatgcgtttatagattatgtcagaaaacataaaaaggaagtgaccatttccgatgacttaattgggagcctttttcagacggctgttcaaagcccggctcatcagattgaaatcaaggaagtgctgacagggtatatgtccgaacttcccgacaattatcgggaggccttaacactgtattatttaaaagaactgaattacaaagaagcatcccatattatgaatatttcagaggctaattttaaaagtgttttatttcgtgccaggcagcggctgaaagcactttataatagaggtgttaatgatgaatgaagaatttaaaaagcgtttttaccaatacaaaaatggagaaatgagcgaccgggaaatggccgcctttgaagaagagctggaaaagctggaagtctatcaggagttgattgaaagcgaaatgcaggacgaccgggaatgggacgtcggcatcagcccggaaaaacagaaggccattttatcatacggaaaacgcaaatcgtatttgcggatttcagttctcgccgtcatttccactttgatgattttgccgctttgcactttaggaagctacctctattacggtctgggaggaaaagaaagcaccggcaatcaattaatggagaccgcggcagtgacggtggcgaccacaatgccgaacgtcctcgtcgatacctccggactgaaaagccaggtgaagctgtttggaatgaatacggaatttccgctgcaaaagcagatcggcacaaaaacgaaatccgtcggcggagaacggattgaaatgtttttagatacggtcaaatcgcctgccgttaactactatgatttagacgcggcacaggcaaagcattatttcgcccatccttccggcttaaaggaacgcacgattgacaaagccggacagacattaaaaaaattgcctgaaggaagcgtggcggaggtctatctttcttatgacagggcctacccttcttctcaagtgtattcaacttttaaaaaatacgatgtgaagtttttatggaacgcggtcgaaacggagaaaaatctgaaagacagtccttatgccgagccgttaggatttcccgggaaagattccaagatggtgtcctctttcgaaacgcaaggacagacagaccgtgaacaatttatcaatgcccttgaatttatgtcccgccataaaaaatgggcgcatgcaatatctaaacgcaaagacatgaatcttggcagccgaatcgactatgttgaacatcacggaatgaacgtatacggctctgtcgtgacggggccgacaaaagaaatcgaacgtctgctgaaaaacaaaacagtaaaagcagcaaacatcggtgaggtggaattatggaattggtaagaatttttaaagagcataatgttttcggctggatatcagtcggtaccgcgattttgtcgctgctgcttttgaacgtggcaatcatcagcaatgtgactttctattcttatcagatgctgccgtttgcgatggccgccgtgccgttcggcatcattgagctgtttattaaaaaaggacggacgggcccgggactgctcggtgtcattctcaatttgttcgtcattgtctgtgtatatacgatcgttgcggttgatacgaatctgcaattcggtttttaaacataaaaacaggcccttttacgggggcctgtttttttaaaatgaaagaacgccgattaaatgcagcaatacgacgatgatagccagcggcacgagatatttcagaaggaaataccacacctgaaagaaacgatagccgatggcggaaccgcttttcatctcggcaaacagctcctgcttcggtattttcagcgggacgaagattgatattaataaagcgccgagcggaatcagcacattgctgacggtgaaatccgcaagatcaaaaaacgtttttccgaacaaatgaacatcaccgagaacaccgtatgataaacaggatggaattccgactaagaaaatgagcagaccgcttgtccacgacagcttctttcttttcgtttcatcacctttcccgacagtcgccacgataatttccaccatcgaaaaggccgaagtcagcgcggcgaagaaaaagaccgtcagaaagctgataaaaaacagcgagccgaacggcagccggtcaaacacagccggcagcacggtaaacagcagtgtaggcccttcatccggtttaaagccgaacgaaaaaaccgccgggaaaatggccagtcccgcaaacagcgtaacgagcacattcatcataacaatggaacccgccgaaccaggaagattttgggttttcggcagatacgaactgtatgtcaccatgaccgaaacaccgagcgttaatgtaaaaaacgcctgtcctaaagcatataggatggattccggcgtcaaatcttcaaagtgcggaaccaataaaaatttaatcccctcaacggcatgatcgagcgtgactgatcgcagcacaagcaatagaaacagcacgaataaaatcggcatcagcaccgcactgacacgttcaatccctttctgcacgccttttgcgacgaccgccaccgtcatgatcataaatacaagctgcgcaatgagagtctggatcggattttcaatgaccgtcccgaacaccgtgccgtactgctcctgagtgagcccggataaagaaccggtaacggcttttaacacataaagcaaaatccacccgccgacaacactgtaaaaagacaaaactaaaaaacaggccgccacacccacataacccgtgaggtgccataccgacttcggcgcggcttgtttgtaggcatcaatcgcatttgtctggctccgtcttccgaaaataaattcaccgagcaaaagcggatagcctaaaagcacggtaaagaggacgaatacaagaaaaaaagcgccccctccgttcgtacccgctacgtaagggaacttccaaatggctcccagaccgatcgccgaaccggcagcggccataataaatcctatttttgaggcccattgaacccttttttggtcagacacgactttccacttcccttccgccctatattatcccttattcgctgcgataacttaagcccatttcaatatgtttcattattccgaaaaataaaaaggagcggcgggtgccgctccttacaaatccccgtttaatttcgaatgctttctcgaatataagaaataaatcaccagaccgatgatcagccagataaagaaacggaatatggtggtggcgccgaggttaataatcaaaaacacgcagaacagaatggacaatatcggaataaagggaacccccggacatttaaaagccctcggcagatcaggctgtttctttctcaatacgataaccgccacggaaatcaggacaaacgcggcaagcgtgccgatgttcaccagcttcgccagttcatcaagcgggacgagcgagccgagtaatgccgacaggatgccgaatacccatgtcaccacgtgcggcgttttatgcttcggatggacttttgaaagcgaccccggcaccaaaccgtcacgggacatggcaaacatcaccctcgtctggccgtacagcatgacgagcatcaccgttgtcattcccaacactgcgccgatatcaataatcccggccacccaattctgtccggccatctgcaggacgagagacacgggatggtcaacgccctcaaagcgggcaaacggaacgacgcccgtcataatcgccgatacggtcacatacagcacggtgcagataattaatgaaaagataattcctttcggcagatccttcgccggatttttcgtttcttcagcggcggaagagacggcgtcaaaaccgataaaagagaagaaaacgagcgccgcggcactgaaaacaccgccgaaacccatcggtataaacggctgccagttgtgaggtttgacatatacggccgcaacggcgataaacaatagaacaaccagaaccttcaaaatgaccatgatattattgacccgcttcgattccctaatgcctaagtagaggaggaatgtaatcgcaagcacgataacaaatgcggggagattaaagaatgtgaccgtgcctttaatggatcccggcgcggccgttaatgcggtcggaagatgaatgccaaagcccgccaagaatgattgaaaatagccggaccagccgaccgaaaccgcgctgacggcgagcatatattccaagattaaatcccatccgatgataaacgctagaagttcacccagtgtcgcataagtaaacgtgtagacggaacctgaaaccgggacgcttgaagcaaattcagcatatgacagagccgcaaataaacacgcaagagcggcgatgacaaatgaaacggtcagccccggccccgccgtgacagcgcctgttccggttaatacaaaaattcccgttccgatgatggcccctatccccagaagggtcaaatcaaaggcccctaactctcttttcagcgacttttccccgctcgttgcggcaagcaggtcctgaatgcttttctttctgaataagctccccttcatctgcttcactccttgtaaatcaatgtatgttagaatattcagataacaatagcaataatgactaaattcttatttttcgcatgaaatgtttcagcacatcatccctttctcctacatcatattatagcgaaaaatataaaaatgaaaataacttttttgaaaattctatatattatttttggttttcataaagcaaaactcagcggattctttactgcaaaatattaacattagtgattctgctggcgacttccattttttaaaaatcgtattcatatgtacgttcaaataaaaatcccgcactttttaaaagcgcgggataaaacttgcgtattatgttgaaataaatctgccgccatttacgtgaatggtctgccccgtcatataggaagattcgtctgaagccagaagcacgtaagctccggcgtgttccgcaggctgtcccggccttcccatcggagtgtccagaccgtgcttttctaccttttcttcagtaaacgtcgccggaatcagagcggtccagatcggtccaggggccaccgcatttactctgatcccctgatcggccaatgacatcgccattgaacgcgtaaaggaaacgatgccgcctttcgtgcacgaatagtcgatcaatgaagtgtctccctgataagcggtaatagacgttgtattaatgatggcgctccctcttttgagatgaggcagcacggcttttgtcatatgaaacatagaaaacatgtttgtacggaatgtcttctccagctgttcagctgtaatatcaagaatcccgttttgcggatgctgctcagccgcattattaacgagaatatctatttttccatagtgatctaagacttgccggaccgccttctgacaatgcgcctcatcaccgacgtctcccggaattaacaggcattcggcctggtattcttccgcacgctttttcgttctctcggcatcggcatgttcgtctaggtacaggatggcaagatccgccccttccttcgcgtaagcgatcgcagccgctgcgccgatgccgctgtctccgcccgtgatgacggcgacttttccttttaatctgcccgacccttttacatccgggtcctccaagagcggtttcggctccatgtctgactcaataccgggctggcgtttttgcacctgcggcttttgtccttccgtctgtctgtccatcggattcatattctcacactcctgcaattggtattactgagacgataccacgcagtgcggggagttaaacggacaaatatgccggtgattaaagctgctgagccgtttcgggaaaagcgccggtgtatttcgcagacggcctgtaaatcatgttgtcagcggactgttcaagcacgtgtgcgcaccagcctgccattctgcttgctgaaaaggtcggcgtaaacaaatcattgtcgacatcaatggcctgcatcacagccgctgcgtaaaactccacattcgtatacagcttccgtccgggcttatattgctctaacaaacggatggcttccttctccacataaagcgccaagtcaagcgacggatcatttcccgccacttcttcagcctttatgcgcagcgcttccgcccgcgggtcttttgttttgtacaccctatgcccgaagcccatcaggcgttctcccttcataagcttcgctgtcaaatatgcttctgcattttcttttttcccgatgtcttcaagcattttcgtgacgcctgaaggtgcgcctccgtgcagcggccctttcatcgtacccaatgcggcagtgacggcagacactaagtctgattccgtcgaaacggtgactctcgctgaaaaagtcgatgcattcatcccgtgctccatcgccagaatcatatacgtctcaagcgctttcttttgggctgcggacggctgcctgcctgtcagcatatacaaatagttttcaacgtgtccgtatcgcgcctcaggtgacaatgcttcctgcccttgtttacggcggtatctgtacgcaataatcgtcggtgtgacggcaatcagtttaatcgcttcttccggcttgggcggatatgtaaatgaatctgtgcccaaacctgaaacagccgttctcagcaccgccatgtcgtccatttcatccggaagcgtttccagtaagtcgatcaaatgtttcggaagcccgcgctcggctgcaagttcttcctgaaacgcaagcaattgccgctcatcaggaagcgtcccgttcaaaatgagatacgccgcttcttcaaaactgaattgcagcgcgatttccttcgcgtcataaccgcgatatattaaatgccccttttctccgtcaatatggctgatagccgtttctgcacaagtaatccctttcaatccactataaatcaatttcattcccccttatcctctttctgttattatagtaaatataatatttaaaaaataatgaatatttttaagggaattaattaaaacttttaatcagaggagtgcatctatggattttaaatggcttcacaccttcgtcaccgcggcaaaatatgagaatttcagaaaaacggcggaaacgctttttttatctcagccgaccgtcaccgttcatataaaattattagagaaagaaatcagctgcaagctgtttcagcggagcggccggaaaatacaattgacggaagaaggaaaagcatacgtgccgtttgccatgaggcttttggaagactatgaaaacagcatggcggagctgcacagggtgcgccagggctactcgcacacgctgacactcgctgtttcgccgcttatcgccgacaccgttctcccgtctgtcatgaagcgttatacagaggacaataaagaaaccgaaatgacggtcaccattttcgaatcggaagaaatcgcctctcaaatcagaaacggctcagccgatatcggactgagctgcttaaaggtgcaatcatcttccctcacttgccgccccctgtacaatgaccccgttgtcctcgtcgcgccgcccggccgaaaacccgggacagggaaggcggatgaagtgaaagacctgttcggacaatatctgcttttgacccataaccatcctgactattgggatgatttgctccgccaggtcagaatacagttccctttcgtcaggacaatgaaggtgacacagacgcatattacgaaacgatttattaaagaggggctgggcgtctcatttctgccgctgtcagcggtacggtccgaactcgccgcaggcagcatgattgaaattccgtgcgaattcgcccagatgccgagcgcgggcgcgtacgccatcgccctctatgaaaatgaaaaaaagaaaacctttttagattttttatcacattttcatttttaggtgaaacaaatggagctctgtcccgtctaaataaaaaacccgttctgatgaacgggtttctatcgctgctagaatcttttcgcgccaaggtagcgaggtttccagtagctgttattcagatcacttgttgtgacgccgtcagaaccggcatggatgaacttgttgtttccgatgtacacacccatgtgtgaagggccggcctgatatgttgtaaagaagacgaagtctcctcttgacgggctggacacgctcttcattgagctccagtatcccgcagtgctcgttctgccgacactcgtctgtttgtttaacaggtaccagataaatccgctgcagtcaaagccggaagttgttgttccgccccatacatacggcgtgccgattaaagattgcgcatcagaaatcagcttgtttacattcaggctcgtctgtgcaacattatggctggatgaaggctgctttgatgacgaagatcctgaagacgttgaaccggaagttgatccctttactttaagaacttgtccgatgcggatcaggtccgtttttaaaccgtttaaactttttaattggtttaccgtcattttatatttattcgcaattttccaaaggctgtcgccttttacgactttatatgtagacgatgatgacttgctgcttgagcttgaacctgaggatgatttaccgttgatcgaaagcgactgaccgatgtaaatgatatccgattttaatttgttctcagatttaatggaattaattgacgttccataccgatttgaaagtccccataatgtatcgcctttttttaccttaatcgtttgcgcagatgccgcgcccgcaaacaaagtcgtccccaaaaccactgccgttgttgctgtaacaagttgctttttcatattttcctccctgaatgattctatctattttatgtgtctcttttttaaagtttttatctgtttcctattataaggttcaatttccactagaaatagacttgacttcccgtgacaaatttcttactaattcgtttcagaaaaaagtttttaagggtattaaatatttcaatttgatttcaaacgtgacgaaaaacgagtcaatttgtcatgtttttttcctgtgattctcgtattttggaaaaacaaagcagtttactttccaaataactccttgttaaaaaaatcctcatctttttcaaaaaagtgaatggttttcactctttcttgaaaacataagttacaccggaatttacatttctaacaatgtttcacctgaaatttacaggagaaacaggcgctctttacaaacaccccctaccattagacatgcagacacgattaaaggaggacgagtgagaatgagtctatttaaacaggttcgatcaaaacttctgccggcggcagccgtatccgtgctgacagccggtctgattgcgggcgcggggcttcagcactccgaacaggctgcggcaaaaaaacagcctgacaaaaacgagatcagaaacgtcatcttcatggtcggcgacggaatgggcgctccctatatgaacgcctaccgttcggtcattaacaaaggaaagccttcggatggtatgaaactgacggcattcgatcccaatctcaccggtatgatgatgacttatcctgacgatcctgattccaatattaccgattccgcggcggctggcacggcaatggccacaggcgtgaaaacgtataacgcggcgatcggagtcgataaaaaaggaaagcgggtaaaatccgtcctcgaagaagcgaaacaaagagggaaatcgaccggacttgtcgcaacttcggagattgcgcacgccacccctgcggcattcggagcccataacaaatcccgaaagaacatggatgacatcgcaagcagctactttgatgaccgcatcaacggaaaacagaaagtcgatgtgctcctcggaggcggcaagtcaaactttatccgtaaagaccgcaatataacaaaggatttcaaaaaagcgggatacagctacgtgacatcaaaacaggagctcaaaaaggatcgtaacaagaagattctcggcctgtttgccgatggcggactcgacaaagcaatcgaccgctcaaacgccgtcccttcattagaagacatgacaacggcagcgatcgacaggctgaacaagaataaaaaagggtttttcttaatggtcgaaggcagccaaattgactgggcgggacatgacaatgatatagtcggcgcaatgagcgaaatgaaggattttgaaaaagcgtataaagcagcgatcgcatttgccaaaaaggacaaacatacgcttgtcgttgccacagctgatcataccaccggcggattgacgatcggcgcgaatggcgataaaaactggcatgttgaaccgattcttgccgcaaaaaaaaccccggcgtttatggctgaccaaatcaaagcgggtaaatccgtatcttccgtgcttgcgcgttatacagacctgaaatggtcaaaagctgaaatcaaacagatcgaaacggccgcaaaacaggatgctgacaagagcgtctacaaagcgatcattaagctctttaatgcgaaaaccaacagcggctggacaaccggcgatcatacgggcgaagaagttcccgtttacgcatacggtccgggaagagagtcatttacggggcttttaaacaacacggatcaggccaaaaagatctttcacatcctgaaacacggaaaataaaaaaggatgcggaggtttccccgcatcctttcttcttttacagatatctccggtgcactcctttgccgtcataagaaaacatcacttctctgtcttcaagaacagattcgatgtgcacgctcctgccccacagctggtacagatacggcagcactttctccaaatatttcagatcaagctcaattccctcataccaatgtttaatataaagctcattattcttcaggtaatccccgtcattgacggtcagataaggaaatcccccgttgacccgcatgttcacgagctgatctcgcacggccttccattctttgtcgatcactttatagtccctgccctgcttttggaataaatacaaatcctcacgcattacgagatctttcgtcaaataattgcggataaatgatatatccgattcaatttccctgacctcaaacattttctcgcgtccggaaccgggctttactcctgtttttttcatttcatctgtcgggttgtcataacgctcttcaatgtcttcaaaaattttcagccctaaataatacgggttgattcccgtttttgacggctgaacgacgcctgcgttcagcttcgcaaattcgatggcttcatctgaagtcaggtcaagctcgcggataatccgctgatgccaataggatgcccagccttcgttcatgattttcgtttccagctgcggccagaaatacagcatttcttctctcatcatggttaaaatgtcacgctgccacggttcaagctcccgcgaatgttcttcgataaacagcagaatatctttttccggccggggcggaaacggttttttcccttttttctttttcacctgcttcggcttatccattccccataaatcatcgtaaggcgatggcgcggtttcttcttcgtcctcctcttcgtcatcgacgctccacagcagcttcggcctgacgagcgacggatcgatatgctcctgaaccgccagaatggcatctaaaaaggactccacctcttttatcccgtgaattctttcataatgcttaatccgctccgccgcagccgccatactctcaaccatgtcccggttcgtattttgaaagcggcagttatgtttgaaaaaatcacaatgggcaagaacatgggctacaattaatttattttggatcagcgaattgctgtccagcaaaaaagcgtagcaagggttggaattaatgacaagttcataaattttgctcaaaccgagatcataatggagtttcatcttatgaaattgtttgccgaaactccagtggctgaatctcgtcggcatgccgtacgcgccgaatgtataaataatttcagccggacaaatttcatatctcatcgggtagaaatcaaggccgaaacccttcgcaatgtcggttatttcctcaattgcccgctgtaaaccttttgtctcctccgcgttcaaccgaatcccccctacttggacttatttataatgtatgacccctcctctcaaaagatgaaataacagaccggtttccggctgaaaactttcggcacatccgcgccgtttgctttatatgtaagtgggtaaaacacacaccataccccaaaaagaaaaggagcgattctacttgaatacagcagacatgcttacgacgtatctcagcaaactcccgaatctggtcattgcactgctcgtcctgcttatcggctggggcattgccaaaatcattgaaaaagccgtatacaaaggcctgcaaaaaacaaaaattgacgacagactgttcgccgaaaaaaagccggcgcgctattcctcagaaaaagtcatcagtaaagtcatttattttatcgcattaatcatcgtttttattctattctttaacattctgcatctgacaaccgtggcttcgccttttgtcagcatgctgtcagcgataacggcggctgtgccgagcattttaaaagccggcctgattctgctgttgggctgggcggccgcttcgcttttcagctatctcgtcaaaaaagcgggcatgaaactcgctgaaaacggccggttcagaaaatggacaatggtgtctgaagaagcggagatgagcagatccgttacggccgcttcacgaatcgttttctacttcgtcttgctcttgttcctgcccggcgtcttggccgctctccaaatcagcggagtatcagggccgtttacaaatatgatccaaagcgttttgtcctttataccgaaagtattcgccgcggcgctgattgttttaatcggctggcttgttgcccgtctcgtccgtgatatcgtcacaaactttctggcgagtatcggcacggaaaggctcgccgcacgtatggggctttctatttatctgaaggatacaagcctgtcggcaatcatcggaacgattgtctacgtgctgattttcattccggtaatcatttctgcgcttgaccggcttgatgtgacgggtatttctgaaccggcgtcagccatgctgcacacggtcttcacaatgctccctaatatcatcatcggtatcgtgctgatcatcgccggcatctggatcggaaaatgggtcaacagcattgtatccgggctcttgcaccgggccggtttcgactctcttctcggtaaaatgggctttgaacaggcgggtaccccgaagctgacgctttctcagacggtcggcatgattgttcagatcatcatcgccctgctctttacggcagaggcgctgcagcttgttcatctcgaatttctcgtcgttatcgcaacaggtattatcgcttacctgcctaatgttctggccgctgtatttattctcggaatcgggcttttggccggacagctcgtcagcaggctgcttgccggcatgctgagcggaaaggaattcagattcctggcgccgcttgcgaaatataccattatcactctctcaatctttatggcgctggatcagctcggtgtcgccgacacgatcgtaaatgccgcgtttattctgattctgggcggtttcgcgcttgccttcggactttcattcggtcttggcggaaaagaatttgcctcccgttatctcgcaaaattggatcgcaaaattgaaaaacatcaatcggctgacgatcgtaagccgccgatgtcttaacaaaaaaacgtgtgctcagaaggagcgcacgtttttttttgagttaaaggggcaaattccttttttttcattttagattcatatatgatagactgtaacagaagcaaaatctctttttccgaggtcattctatgaaattaacgaactataccgattattctttacgcgttttgatttttttggcttccaaacattccgacgaactttccaacataaaagaaatcgcagatacttattccatctctaaaaaccacctcatgaaagtcatttaccgcctcggccagctcgggtatgtcgaaacgatccggggccggggaggcggaatccgattaggaatgacaccggaagacataaacattggagaagtcgttcgaaatacagaagacgactttaacatcgtagaatgctttgactccaaaaaaaatctctgtatcatatctcccgcctgcaacttaaagaaccttctgaatgaagccctgcaagcttacttggccgttttagacaaatatacgttaagggatctggtcaaaaacaaagaggagattatgagactgctcagaagctgaaggaatgtccgcattccttcttttttttatgcctgcgtaagaaaaaaggactatttctattaatatgataaacgattgcagacaagtgccgatataaagattatcattactgatatcctcaccttgcggctgcaacgaatggggatagtaaaatcatcgcaggaaaagggagattcattatgaaaaaaaaggtagcggtcggtttgactgcatctgcgatcgtcgggtctgcgttagctgtaacaccggcagaagcacaaacgattaaggttaaaagcggagattcattatggaagcttgcccaaaactacaatacaagcgtggatgccattacatcagccaatcatctaaaatccaccgttatttctatcgggcagacgctcaacattcctaacggcaaatcagattccggcagctcaaagccatcttcaaagaacagcggcacgactaaaagcgtctatacagtgaaaagcggcgactcgctgtggctgatcgcatctgattttaaaatgtccgtacaggaactgaaaaaattgaacggtctgacaagcgacttaatccgcgccggacagaagctgcaagtgacggggaaagtttcctcaagcaccgatcagaaaaaaaccacaccgggcagcagctcaaacagcagcaaaaagcagtcatcatcttccgggacgtataaagtcaaactcggcgattcactatggaagatcgcaaacagcgtcaatatgaccattgcggaactcaaagtattaaacaacttaaaaacggatacgatctacgtaaaccaagtcctgaaaacaaaaggaacgtcttcttcgggaaacacgccgtcaaaagacaattcaaaccaaaataaaaaccagacgcaaacgtcctcttatacagtaaaaagcggagactcactctggaaaatcgcaaacgcatacaacatgacggttcagcaaatcagaagcatcaacaaactgacgtcagacatgctgcgggtcggacaagtgcttaagctgacaaaaacgtcatcttccggctcttcgacttcaccgtcaactccgaaccagtccggagatacagggaaaaccactacatataccgtgaaaagcggggattctttatgggtgatcgcccaaaagttcaatgtgacggcccagcagatccgcgagaaaaacaatctgaaaacagatgttcttcaaatcggacaaaagctgacgattaccggacagcagacaaacacgacaccgaatcagtccggcaacacaggcggcacaggttcaacaagcgcgaagattaatgtaatgattgatgccgcaaaagctcaactgggcgtaccgtatgtatggggtgggacaacgccgagaggctttgactgcagcggtttcatttattacgttctcaataaggtcacttctgtatccagactttcagccgcaggctactggaatacgatgacatcagtcagccagccggcggtcggtgactttgtctttttctcaacttataaagccggaccttcccacgtcggtatttatctcgggaacggccagtttattaatgccaacgattcgggtgtcgttatttccagcatgaacaattcctattggaaacagcgctacctcggcgcaaaacgtttcttctgatatctgacaagctgtacggcctcaattggctgtgcagctttttttacagtctgaaaatattaatgctgatcacatgttttgtcaccggatggaaatacacttcagcacgggatgaaaacgtttcttttgctgtttgcaccgttacgcgaaacacatctttcgtctgctcccggttcacttttgtacggcccatgtacgaataatcggtaagctcggcccccttgtattcacgttcaagctggttccatgcgagctgctcccatttttcaactgatggatcaaggtgttctgtatgccctttttcagcgatcgaggcaatgagaatgccgcaaaacaagagggcaagcgcaaatggaagggatttcatctttatgttctcctgagtcgttttttgtcaatcttagcgtgtccaaagaagagacggatatgcggttttattttatgtctccctcatattgctatgccgcagtgataaggacaccaacttttcccccgttgcatccgggcttcagcggcataaactaacggagaacttctcattgaaaggagaagcgttagatggatcatgccgattatgacaaagccttgtattacacacaccggtctcaatgggacaatttgttaatattgatggttcgtacaaaagatgatttattatcaaagcgtattgagcactttctgcacgcgtatcatttcgaatatgatcatgcggtgcttgaaaaagagctgtattctcttctcgggtatattgatcatgcggcagagctcgcttatgaagatcaattagccatgctgacataaaaacaatcccggcgtcagacgccgggatttcttgtgtttgtgaacatattcagctcttcgatcatctctttcaggctgaccgccatatcctcagatacggtccggcgctccatgtcaatgtgaatcggatctaagaccagctgtttcgggatgacatttgcataaacgccccgcatgaccgtccgcatattcgccagcgcgttcatgcctccttttcctccgcccgccgcggcaatgattgccaccggtttgtatgcccagtgatcgctgcttaaaaaatcgatggcgttttttaaagcgccgctcatgccgctgtgatactcgggagataataagacgacggccgccgactttttcacctgccgccttaactcttgcactgaaggcagctcgttctgttcttcttcaccgttataaagcggcagatcactttcgctcaaatcaacataatcggtatgaaaccgatctctgatataagaagcggcaattctagtccgcccgttttttctcggtgttccgctgatcactaatatgctcatgattttaccgcctttccaaaaacattatattttactgcatacaatgccgcctgcgtccgatcggaaagattcagctttgacagcaggttggacacgtgggtcttcactgttttttctgaaataaacagtgccgccgcaatttccttattgctttttcctttggctatttcttgaagaacatctttttcacgaggggtcaggtgataatatctttccttatcctgatcatcctgaaccatgtgggtcagcacatgaggcacaatatccgccgacagccggtaacgtccggaatacacttcccggagcgttttcactaaatcatcgggctgggcgtctttcagctgatacgcttttgcgccggctttaagggcgggaatgacatgctcctgatcagaatagctcgtcaaaacgacgatactgatgtccggaaatcgttcagccgcaatttttgccgcttctatgccgtccatatcaggcattgataaatccatcagaatgatgtccggctccgtcttttcagcttgctgaagcgcttcagcaccggtggacgcctcaccgacaacttcaatgtcttcctgagtggcgaagaaatagcgcagtcctttgcggacaacgtgatgatcatcagcaatcacaattttcatcaatcagacctcctgtcccgaaacggaagccgaacggagacaatcgttccggcgccaagctcggattgcaatgtaaagcggcctccgatcgcttcagcccgcgctttcatgccggccacgccgagcgaggggagcacagcatgcgcatcagcgctaaagcccgctccacggtcgctaatgtgaagctcggcgcaatccggctttttaacggcggaaatgataacccggtccgttcccgcatgctttttacagttattcaaggcttcctgggcgatccgccaaagcgcgtgttcctgttcatccgtaagctccagctcatcctccatttcacaaacggcttccaggccgataagagcggcatagcttttgatcgacgcatacagccctttcgtcaaactttccggcttcagctgccaaataagcgccctcatttctgttagcgcatcctgagacagctcttgaataaacgtaatcatctgacggagccgatcatcatctgtaaagctctttgcggcttttgccgttaagctgacagaaaacagcatctgattgacggaatcatgcagctcttgcgcaagtctgcttcgttccaccaacagggcgttctgctgctcaaattcggccaaattcatccgctgaatcgccgttccgatttgaaatgcaaccgcttcaagcagatgcagttcttcttcgttgaaaaatgtcttttcgcttgcggcgacgtttaataaaccgaacttccggccgccgtcctcaagcggtacggtcgcatgatgggtaatgccctccgtatcgcggcagttcgtcgtctgttcggcaaattcaatccgtttacaattcattatgtttacggcctttgtcaatccgccattgctgaatttggtcaaacaatagcattccccgctgcacatgagtgcattttcccgctgaccgagagccggcggtaaataagcggatgcggcgagcgtataagatccgtccggctcaatcagaaaaatccaccctgtctgcagcccggtcaggctgagcagttcgcggagcactttatcaagcgcttcctttaaatcgtggctttggtttaaggtttccgcaatcgcttttaacgtttttaacgtttctaccgtcgttttcgtcaatttccctcactccggccaatcagagttatccatattatatcaattcttttctgtatattcctttgttttcagcatgaattttcctcatactttcggatgaggcgtataaaaaaaccgccggatacgcttccggcggttttttgtttatttcgttttttccactatgccatccactgttttcatgacggcttcagataatgcggcaagacgctgttcgctgtcttgtaaagaagttcccttcacggcgaaatagaacttcactttcggctccgttcccgatggacgaagacagaaccaagagccgtcttcaaggaaatatttcaggacattagacttcggcagatcaatatcctcttcatgatgatcggcaaatacagtccgttttcccgttgaatagtcttcagcctgcgtgatttgttttccggccatctgcttcggcggatcgtttcggaaggaagtcaggatagcggaaatctgctcggctccctgttttccttttaacgtcaatgacttcaagccttcacggtaatatccgtattctttaaaaatggacagcagcgcatcataaagcgacatgccctgctttttataaaaggcgcatacctcgacggctaacagcgcagcctggatcgcgtctttgtcacgcgcgaaatctccgattaagtagccgtagctttcttcatacccgaactggaacgtgtattggcctgatttttcatattctttgatcttttcaccgataaatttgaagcctgtcagcgtgtcaaccgtatctaatccgaacgatgaagcgacggcgcggcccaattcgctcgtgacaatcgttttcatgacgacaccgttttcaggaagggtgccctgttttttcttctcggaaagcaggtaatgcaataaaagcgcgcctgtctggtttcccgtcagcactgtgtacttgccttcgctgttttttacagcaatgccgagacggtcggcatccgggtccgtagcgacgagaatatcagcgttttgttcttctccgagtttaatggcatattcgaatgccgcgtgctcttccggattcggcgatttgacggttgaaaaatccgggtccggcagctcttgctcctttacgacggtgacgtttttgtaaccgagtgcttcaagaccgcggcgcaccggtttatttgccgtgccgtgcagcggagtgaacacgacgctgacatccacttcatccgaaagctcgggatgaacggagatggaagtcagttcttcagtatacggtttatcaatttcttcaccgattattttaatcaaacctttttctttcagtgactgttcatcttcaacttgaatcgttaattcattttctatggcattcacttccgcaatgacgatgtccgcttctttcggcggcagctgtgcgccgtcatcgccatacactttatatccgttatattcaggcgggttatggctggccgtcacgacgataccggcataagcgttcagctttctcaccgcaaaagacagctcaggcgtcgggcggagctcatcaaatacgtatgtttgaatgccttgggaagcaagggtttttgcagcttccatcgcaaactcaggagatttatgacgggagtcgtatgcgatcgcaacccctctttttttcgcgtcttccccttgtttcgcgatatacgccgcaagtccggcggatgctttgcggaccgtgtaaatattcatcctgttcgtacccggcccgatttctcctctcatgcctcctgttccgaactcaagatttttgtagaaaaaatcttccagcagctgctcgtttccttctgcgtccgccaataattttttcaattctgaatctaattgttcggcctgattccagcgttcgtaactcttactccaactcatgttcgtcctcctataatttcagcttatgaccatattttaatatgaagcggctgcccgtgtcacttgataacttaaccaaatgctttatgtaagaagataaaagaagggctcatgccttttcggcacagccctccggttattattgttcgagcggaacaaccgcgtcgtgcagcagcgtatttaaccactcagtgtgtttttctttcgtttcgtcattccattggaatcggtcgctcatgtaatcaatcacggccgttttatacgtttgcacccatttgatgtcgaagaacagtcttcccgttctgcggacgaagaaatcggcaggtgtcgcagccatttcttcttcgatgctgtaagccgcttccgccagaatgtgaaccggaatctgacgtttttccgcttcgtctttcagaccttcaatccggctgaatacattttcaacgttagagccgtatctgatggctaactgcttagcggtttcctgtgataaaccgattttcaagccgtcttttgtctttgcttccacaaatgactcgaagtttttagagccgccgacatgtccgccggaaatcggcatcgtcttcgtcttgcagccgccgaagtcctcgccgccctcttctttcaagcggtcgcggacaagatcgacaatgtgctcagccattttacggtagcccgtcagttttcctccggcgatcgtaatcaggcctgattgagatgtccagatttcatctttacgggagatctcagacgggtctttcccttcttcgtgaataagcggtctgaggccggcccagcttgattcaatatcgtccgccgtaatgttcagttccgggaacatataattgatggagctgacgacataatcgcgatcctgcaccgtcatgcgcgggtgctcaagtttttgtttgtaaaccgtatcggtcgtacccacgtatgtttttccttcacgcggaatggcgaacaccatccggccgtccggcgtatcaaagtacaccgcctgtttaagcgggaatacggattggtcgaatacgagatggaccccttttgtgtgctgaagatgttttccgcttttgctgtggtctttttctctcagctcgtcgacccacggacctgtcgcattgacgatttttttggcgtaaactttgtattccttgcctgacagcagatcttcaattaaaacgccgacaacttttcctttttcataaagaagttctttcactttagaatagttgacaggctccgcaccgaatttaacggcttctttcatgacttcaatcgtcagtctcgcatcgtccgtccggtactctacataatagcctccgccttttaagccgtcttttttgacgagcggctctttttgcagtgtttctttagcagacagcatgcttctgcgctctgatttttttactcccgctaaatagtcatacacacgcagaccgatggaagtagagaatgaaccgaacgtgccgcctttatgaaacggcagcagcatccattccggcgtcgtgacgtgcgggccgttttcgtacacgatggcacgttccttaccgacttctgcaaccattttgacttcaaattgcttcagataacgcaaaccgccgtggacaagctttgtggatctgcttgatgtgccggccgcgaaatcctgcatttcgctcaaagcgactttcattccccttgaagcagcgtcaagcgccgtgccggcacccgtaatacctccgcctataataaacagatcgtatgtttttttagtcatgtcttccagcatatgatcccgttccaaacttgaaaattggtgattcatcattacgtttcctccttgttgtcacggtatagaaaaagagaccacaacagccaaagcgcatgtcatcactttggtgctgtggtctctcctcatctcaggaccgttcctattaacttgttttcagtataccacatttttatcttatttaaaagccatagctgcatttactgcttttttccatccgccgtacaattcatcgcgtttttcatcttccatttccggtttgaattgcttatcaaggttccattgatcagcgatttcagtgctgtccttccagtagccgacagcgattccggccaaatacgcagcaccgagcgccgtcgtttcattaatttccggacgttcgaccggcacatcaagcaagtcgctctggaactgcatgaggaagttattttttaccgctccgccgtctacacgcaatgtttttaaagagatgcctgaatcagcctccatggcatcaagcacatctttcgcctgataagcgagagattcaagcgtagcccggatgaaatgctccttcgtcgttccgcgtgtcaggccgaaaactgagccgcgcacgtcactgtcccagtacggtgtgcctaatccgacgaaagcgggcacgacataaacaccatcagcggaatccacacgctctgcgtatgtctcgctttctttcgaatcttggaacatccgcatgccgtctctcagccattggatggcagaacctgcgacaaagatgcttccttccagtgcatactcgacttttccgtctaatccccaggcgattgtcgtcagaaggccgtgatcagaagtgatggctttttctccggtattcatcagcataaagcagcctgtgccgtatgtgtttttccccatgccttcttcaaagcacgcctggccgaacagcgcagactgctggtctccggccgctcccgcaatcggaatgtttttaccgaagaaatgataatcaaccgttttcgcatacacatgagaagacggtttcacttccggcagcattgatttcggtacgcctaaaatatcaagcagctcgtcatcccattttaattcatgtatattaaacatcagggttcttgaagcgttggaataatccgttacgtgcgccgcccctccggacattttccagatgagccatgaatcaatcgttccgaacagaagatttccgttttccgctttttcccgcgcgccttctacattgtcaagaatccatttgactttcgttcctgagaaataagggtcgatcaaaagtcccgttttttctctgaatgtatcattatatcctttttcacgaagctcttcgcaaatgccggatgtttgtctcgattgccacacaatcgcattgtataccggctttccggtatctttatcccatacgaccgtcgtttccctttggttcgtgatgccgatgccggcaatttgatcagcgctgattccggactcggagatcacagtcgcgataacggcgagcaccgatccccagatttcgttcgcattgtgctccacccagcccggctgagggaaatgctgtgtgaattccttttgagcggaatgcacgatttttccttctttattaaaaagaatcgctcttgaacttgttgtgccttggtcaattgataaaatataggtctccatgatgccgctctcctttttaaatatattcagaatttgataatgttttctgtgattgagatttcttggtataaatatagagtatgaaaagtactacaaccattataacgcttacaaaccaaaagctaggtgtcacatttcctttaaacgcggcattgtaaaatacgccgccgaacgcaccgcccatgatcggaccgactacgggaatccaggcatatttccaatttgacggcccttttttcggaatcggcaaaaaggcgtgagcgattctcggccccaaatcccgcgcagggttgatcgcatatccggtcgtccctccaagagaaatcccgatggcaacgatgaggaatccgacaatcagcgggttcagcccttttgtaaattcattcgctccgattgccaaaatgccgagcacaagcacaaacgtaccaatgacttcacttatcatattcccaaatgtatgaggaatactcggaccggtcgagaaaacgcccagtttggcggccggatcatccgtcgccttccaatgcggcagataatgaaggaacacaacaaccgcaccgatcattgctccgatcatctgtcctgcaatataaacagggacctctttccaaggaaagctgccttcaagcgcaaggcctatcgttaaagccggattcaagtgggcgccgctgatgctgccgacggcatatgccgccatggctactcccaatccccagccgaatacaataacaatccatccggattggtatgaaagcgatttctttaaattgactcccgcacaaacgccgccgccgaaaataacaagcagcattgtaccgattacttctccccaaaatgctgtcatcatcattcctcctaaatgacaaaatagcaggtttgacagagttatagagaataaaaaacccacaacaaaccgctttacgctttattgcttccgtaaagagctgttgtgggtctccggatctccatcacatagtattaacctaggtctattgtaacaatgggtgtaagcggtgtcaatctttttttgtcatagaatgttcatatttagcccatagttcggtgtctgaagtcgtcacggccgtggctcctgcctgcaaggcgttttcaacgtcctgctccgtgcggatgaagccgccggcaaaaataggaatccccgtcatttctttaatttctctgattaaagtcggaacaatgcctgggagaacctcgataaagtcaggtttatgctttccgacgaattccatgcttttctccatggcgctcgtatccaagagaaacagacgctggatcgcgtatattttcttttgtttcgctttgacgatgactgatgatctcgtcgaaatgatacccgcgggccggatatcctgacaaataaactccgcaccgtattcgtcatgcttaatgccgtgaattaaatcgacgtgaaccatcagaagttttccgtgtttttttgcttcattcacgacaccttttaattgaccaaggtggatatctaaaatgacgccgtataagaacggactctctaaaaatgcatcgaattgcttcatgttccggatagccggtagaatctgctggttgtgaaaactcatgttttactcctttacattaaaaatcaatgctcatcacgctttccttgacggtcgaaatgatgaaagagagctcctcgtccgacaggcaaaaaggcggagacagctgaatgacattattatatcccgctacagtatcaccatttttcccgacaagcaggcctttttctctgcacgcggtgatgacgtgctgcacaagggcggcatcagcgggttccttcgtgactttgtccttgacgagctcaatgccggcaagaaggcccttgccccgtacatctccgaccgccggatgttctctgagcggctcaagctcacggagcagcctttctccaagctcccgggagcgggcgatcagattttcgtcctccatcaattgcaggtttttcaaagccagggcgcaggctgccggattgcctccgaatgtattcacgtgccggaagcggccgtacggctcaccgcccgaatacgcctcaaaaatctcccgttttaccgccgttgccgacagcggcagataagcgctcgtaatgccttttgccattgtgacgatgtccggtgaaacgccgtaatgctgaaatccgaacggctctcccgtgcggccgaaaccgcaaataacttcatcactgatcagaagcgcgccgtggcggcggcaaatgtcctctacctttgccatatacccgtccgggggcatcagtatccctccgcctgtaataatcggttccataatcacgccggcaatcgtttcgcttaattcccacgtcatgatccggtcgatttcatgcgcgctttccaatgtgacggcatcgccgggattccgataaagatcaggcggcgccgcgtgcaaaaaaccttgtgagagcggctcatatttatattttctctgcgcctggccggtagcggcgagcgcccccatcgtattgccgtgatagcctctgtaccgggagatgaatttgaagcggctgtgatcgccgttttcaatgtggtattggcgggcaattttgaacgcggtttcatttgcttccgatccgctgttggaaaagaagatcacataatcgccgccgagccattcattcagtttttccgcaagctcaatcgcgggttgatggctttgggtcagcggataataaggaagctccttcaattggctgtaagccgcatcggcaagctcctttctcccgtatccgatattgacgcaccacagtcctgacatgccgtccaaataccgtctgccgtcaatatccgtaacccaggcgccttcccctttttggacgattatgctgtcatccggctccgcccctttcatcgcgtgccaaatcagctctttatccttttgtttgagtgactgatttttttgtacatgttccacaccgctcatctccctttcaatatcattgcactgtatcgaaagctgcccggcttctgacgccgattctcttggtgaagttttcctcttaataagaatataaaggcgcggcatgggcgagtcaataaagcggcggcaattaaaaaaacgctttctcccagaaagcgaaagggctacaagagcatatcccgaaaccggggccggtgcaagtgtttttataaaaaaacccgccccttaagcggagcgggcgtttttttatttcaggtgcgtaatccggtaaatatctttgcgccggtctttcagctggcgcacggttccgttttcacgctgccttcttaagatttcaaggtccacgtccccgatcacgaccatttcgatattcggattcgtttcaccgacgattccgtctctggcaaattcaaaatccgacggagcaaaaatggctgactgcgcgtattgaatatccatattttctgtttgcggcaggtttccgaccgtacctgagatgacggtgtaaatttggttttcaaccgctcgcgcctgagagcagtaccttacgcgcaagtagccttggcggtcttcagtacagaacggcgtaaagataattttcgccccttgatccgcggcaattctcgcaagctccggaaattcgatatcgtaacagatctgaatggcaatctttccgcagtccgtatcaaatacgcgcaccctgtctccggcgctgatgccccaccatttccgctcattcggcgtaatgtgaagcttatattgtttttcaatcgtgccgtcacgtctgaataagtaggcgatgttataaattttcccctcttcttcaacgaagtgagagccgccgatgatgttgacgttatatttcaccgcgagatctgtaaagaggctgatatagtcctcggtatattcggtaatcctctgaatggccagactcggagaacgctcctcgagaaatgacatcagctgcgtcgtgaaaatttccgggaacaccgcgaaatcagatctcgcatcggaagccacatcgacataatattcaacctgattggcaaattcctcgaaggagtaaatctttttcatttcatattgaatgacgcaaatgcgcaccggaaatgccgatttgtaatagcgcttcgactgcggcaggtaatcgacattgttccattgcattaatgtcgcatatttaatggacgcggtgtcatccgggagataattcggattgatccgcatgagcgtaaatccgttcatcagctggaaagaaagcaccggatcataaatctgatggcgcgtcacctgttcgacataggctctcgccgtcatttcttccgcatacttatgataattcggaatccgcccgccgataatgatgcttttcagattcaatcgtctcgccaagtcttttctcgcctcatacagccggtgtccgattttcatccgtctgtattccgggtgaaccattacctcaatcccgtacagattcaatccgtccgggttgtggttcgtgatataaccgtcgtctgtaatgtcctgccacgtgtggcggtcatcatattcatcgaaattgatgatcaggcttgagcatgaaccgataatttccccttcatactccgcgcaaaactgaccttccggaaagtgcgcgagatggctgattaaatgctcaggctcccacggctccatccccgggaaacaatccttttgcagctcaataattttgttaatatctttctcttccatattccgtatgaccattttcttttcaaaacgggtcagatcaagtttctcagacaatgctgcttccccctgccggttcgttttgatcgttcaatcgctgtaagagtaattcaagttccatttcagccatcgattccagtctgtgatcgtattcttcaaacaacagggcgcttgttaccttattcgggacgatgacacatttcatgccggcccgtttggctgcgattgagccgttgaccgaatcctcaaaggccagacattcagatggttcaacgcccaaatgttccgcagctttcagatagagctccggattcggcttcacttcttctacgtcgtcagccgtctgaatcacttcaaattcatcaaacaggcctaattccttcagatggcccgacacccatttaaaatctgagctggaagcgagccccaccttcaatcctaattcttttgccgcggctaaataagcctccaccccgggacgcgccgtttccgtcttcatccgctgttcgaagcgcccgcgcctgatcgccgtcagttcatcatgatcgagctttcttcccagctgctcctctaaatatgcgaacggcttaaaccccgcggccgttccgatcacctttccccagacggataaaggcaatgttgaaccgtgttcttcaaacatttcctgcagcacttcatattcatgggtttctgtatctaaaattaacccgtcaaaatcaaagattaatgcttttatcaatggttacagctcctttagttaaacgtactgacctatgtatacactataccgtgaatttctttcgcgttcaaaatgtaacattctgacggaaagaagagcctgcatgagtgcaagctctcttcatccgttactgtgtgttttgactggaaatattggaaagagccgctcccgcagactcatttgaacgctgatcaaccgctaagtctccaagcgcaacgatcccgaccagatgattttgatcgacaatgggaaggcggcggatttggtgttgggccatcagatgtgacgcctcttcaagactcatttccgggtttccggatacaactgtagaggacatcacgtgtgaaacaggtgtttggccgtcgcggccttgagccgttgttctcaatgcgatatcacggtctgtcagcattccttttaattcccctccgtcaacgacgggaattgctccgacattatgctggtgcatcagcgcagccgcttcctggatcgtttgattgggagaaacggtagccacgtgggtagtcattgattgtttgattgaactcattgtaaagcacccctttcgacatttattatgctcggggatttgtctcaatataaagggagttagaggaaagaaattgtggtatcatgtcaaggaagcaaaaaaagagcctgtcaaaaggctctttacacccgtcagatcaaccttctgcgaccgcaggcttctgatccggcacctgtctcgaaatcatcataggtaaacggaaaattcattccgcattcattcagcaaagcgcaatttttatcaaacagcgcccgctctttgacgtcatataccgggtgcggctttgacagcatgatatgtaccgtttgcagacaagccattatttgaaacgcttcttttaaagttccttggtaacgttggttttgtaatgataatacgcccctttttttaaagcgctgaatttccagttcggagaaataaagaggaaagacattttgaaacaattcagaggaaagctcttgtatcgcgctttcttgtccgtcagtcgctgcgttcacaattctcacatcaatcacctttcttgccatgtgaatatccttaatctttatcaagaatagcatagaaaaaaacgcgaaagctaaggtaagtgtttcctgttgaaacagccgctttccgcttgaaaaggagctttatgaaatgaaacaaaatgaccgcggtctggaactcctgattacggaaaagcacgccggacaatggctgttttcagtcctgaaatctgaattccaggcgtcaaaacccgtaattacggaatggatgaaccaagaaagcatccaggtgaatcgaacatcaccgaaaaacaacatcatactgaaaaccggagatcgcttattcattgatcttcaggaaaaaacgggttcctcggtgattcctgaatacggagagccggacattttatttgaggacaatcatatgctgattgcaaataagccggcgggaatgccgactcatccaaatgaagagggtcagaccggcaccctcagcaacctgatcgcttaccattttcaaatcaacggcgagcaggcgaaagtgcgccacgttcaccgtcttgaccgtgacacttcaggcgcggtcgttttcgcgaaacaccgcctggcccatgcaatccttgaccgtcagctcgaaaccaaaacattaaaacgcacctatatcgccgcggcggaaggaaaagtgacgcctaaaaaaggcacggttgactcgccgatcggccgcgacaggtcacattccgtcagacggcgcgtctcacccggcggacaagccgccgtcacccattacaaagtgaaaggctatcatcccggtgcgcagcttacattggcagagcttgaactggaaaccgggagaacacatcaaatcagggtgcatatggcaagcatcggccatccgttggcgggcgatgacctgtacggcggaagcaggacgctgtttcacaggcaggcgcttcacgccaaaaaagtcagtgtcgtccatccgatctcaggagaagaaatcgttgccgaggcgccgatgccggctgatctggctcattttacggaaacgtatttttcttaaaccgggtcggcatatataatatatcgtttcggcgcatttccaatgtaagaaaacggatagcaagtggtcaggatcagttcctcccgcttgtgctgaagggtgatgacagatgtatcatcccggctgacgatttttgtacggctgattttataagaaaacgtgccgtaagacaaaatcacgttcagtctgtctccttttttcagttcgccggtccggcggaactccgtgtccctgtggccggataacacaatttggccgtgatcgcccggataatagctgtccttataatgtccgacgccttttgctaaatcatctgcgtcagtcccttcgacgatcgggagctcagcgtcgatttcagggatttctaaaatgccgcttgcctcacccgtttcggggtgaaattcttttttgcgctgtgtcagcacagcgctttttgtttttttcttttccaagacaggttctgttgctttttttgcttcttcaagcgattggttcgttttcatatgtgaatcaatgatcttccagcttccgtaacatgtgatgatgataccgacgatgatgacgagaagcggaatatgtttcagtttgttcatcgtgtgcgggttccccttttctttctgaaaagccaatatacgccggcacccgtgatcaccaggccggccaatgccgtctgatggctgcccgctgaagtatcaggcaatgggcggccttttggtgtgccgctttcagtctgttctgtgctttgttccgaatttgcggcaggcgccggacgggattcgggaattgcctgcactgcatcagatgctgtttcttctgcgacaggacgttcaggttttttggtttgatcaggctgttctgctgcatcaaattttttagcgggtttttccgcttgcggtttttctcctttatcaggcctggtgccgcccggtgtttccccgcttcccggctgattgccggtatcatcaggtgtttcggcggctgatgccgtgcggatgcggccgtcggtctgataagaaatcggtgcggaaaagcttttgacatagtctactgtcgcttccaaatcctcaggccccgtcaccgggttcttgccgagttttccgatcggaccgtatttttcccccgctgccgtcgccataaattgattgactgttactgtatatcctttttcgggctgtatgtctgtcccgtccgccatcttcatatcaaccgcttgtccggttttcgggttccatgtataggtaaatccgctgatgctgtaatccggaccgtacaccggagaaatttgcgcgttgatgatctcccgcaaatcttttcctttgatttcaagcttcgtcagcacattgccgaacggctgtacattataaaggtctccccatgtgatcggccctttttttaagccgtcccggatgcctcctccattcataagcgcaaaatcggatttcatcttcgctttcataccgtcggcaatcagatttccgagcgccgtgtcgccgtcatttgaatacccgcccgttatatcatgggccgcttccccgatcgtttcgctgataatcggtttcactttctcttcatatttgcttaatatgcctgccgcagccgggtcaggcttgattttactttgatcgatatattggatttccgctgattttttcacgatatccttcgactctttatcaagttcaagatcggcgattccgattgcttttccgtattcaaatgcctgcacgatcagcttgccgtcgatttctccgtttacgactttatgattgtgcgcggcgaaaatcacatcaatctctgagtctgttccgcttgcaagctttgcggattctcccgtgatggctgagccattttgttcagcagacatatgggcgagcacggcgattgctttaattccttttttcttcaggtcagcggcggcgtcattgacagcctttacctcatccgtaaacgtaatatttttaattccgtccgggatgaccatgcctgccgccgatctggttacaaccccgataaatgcgaccggaattccggaaatgtatttaatttcatacggcggcagaaaggactcccctgacttcagtttacagttggcgcagacgagcgggaaattttggccgtcataaccgcttgtccccttaccgtccggatgatctcctccattgatgatccgtttaagctcattcgttccttcatcgaattcgtgattgccgacagttccgacatcaaaaccgatgtcttccatcagttctactgtcggttcatcctgaaaaagggctgacacgggagagctgcccccgatcatatcgcccgcatgtaccacgagggcgtgttctttctcggctttcgcctttttaatgtacgcagcggcgtagtccattcgcccgaaagtgccatccggtttaccgtctccgttaatgtcaagctcatattgctgatcaatttttccgtgcagatcattcatgctgatgattctgagtgggacacggccggagtcttcagtctgccgttctttatacgctttatccgttccagcttcattcagtgatcctgcttgtccgattgcttccgcatctttcacgctgaacatcataaaacaaaccgtgagcaaacagcacgaaagacgcatacccctttttttcttcattcatttccccccctgtcttctaagaaatacgttagcttattttcttaaaaatcacatcacttttttgtaaagattgtcttcgctggcgcaaaatagtaaataatccccacgtaacgaaacaggtcttgatgtataacggatcggcttttttcacatcttaatgatgatttgacatgaaggaggaaaacaaccagtggaacagcagcagaatcagcagcagccgccagtaaatcaggggatcccgggttcaccgcaagtgaatcacggaggacatgagcttttcgatatgcatgaagtgctggccggaacagtcggtgttttggatcaatttatgatgctcagacagtttatacaggatcagcatctggccgacatccttgaccgccagtatcaattcattctcggactctataatctgacggcagaatgctttaagaccggccaaaagccttctcaggaaacgtcgacatatatgatgaaggaacagaaccaggccgtctacggtataaaaccgactcagccgaaaaaaccgaatcaatcattaaatgatgtcaaagatctcgggatcagcggccatatgctcggcctgattaaagctcaagcttctctcttgacgatgagctcgcttgaaatgaccaatcccgtcacaagaagagtgctctccgcgcaaattcagcaatatgtcgaaatggcgtttgaaatcttcttataccaaaataaacacggttattatcaggttcctcagctcaatgcacaagatatgcagactatgctgaattcatttgcaccggcccagggacagccgcaaatgcctccgattaaaggacaaatgggacagcagcagcaaaacctccattgattaaaaaacggcgttggaaacctgactctccaatgccgttttctttttttcatatgcttttgtgaaatcatgttcaaattgtttcaggctttctttcgtagccgcttcaaagcctttttcaaaatcctgtgtttcggcggttttattgataatggttaagataatgccttctccgaatgtttcggttaagtcctttatcatatagaagctttgcaaatagacatctgtttcatattccatacgcgatttctgccattttcggtcggtcgttaattgatcaaacggcacgacggaaaatgcaatcggatcaatgactacatcataatgcgcgacccactcgctcagcccctcatgaaaccaaagcggaaatacagacgtatccgtccccaattgccgcgttttttgatgaaaggcgtagtgtgtgtattcatgtataatcaattgcttatacatgaaaacggccagctcatcttttttcagaagctgttttttctcttcaggcaaaagccccatcatctgctcctgttctgaataaaaaccgactacatttttcaatcctgaatattgctccatttcagcttcatccgaaaagaaaatgagttcaagtggcgctgcacctttatagccgacaatgatttgattgatacgctttgcgtggtccagcgtaagcttggtcagatccaagagcggtttttcatccgccgtatagtaaatcgctgtatgtttgtaaatttctttattcatgtgttcagtcacttgttccttcgtcggaacagagcggctgttttggcctgacaggatgtacatcatacttactgaaacggctgaactgacagccaatatgacaaggactccgcacaggatcagagtgaatgccgcccgtttccccatgccgtcacgcaaacaagctcccctccccgatcctttaattttcatctcattctttactttatgctcaggagcgctgggtcgtgacggcagataaaataaaaaagccgcatcaaatgcggcttttccattcatttatttattggggtttgggaatacacgctgcaccatttgaccgaattcatcaaacagaccggatacaggatgtccgttttggattcgttttccgtagccttgcatacgttcaacgaagtccgggttcgctgatacatatacagtccggacatgtttatcggccgatttcaccttatcggtaatcttattttttaaatggttggcgatggcgcctttttgtccgtttgtcaaaacaacggctacataagcgctgtttccggcaacgatcacagtcgcatttttaacctcttttaaatcagtcaccttgtcagcggctttatcagccactctcaggttacgattgtcattgtgatcggtgttttggttatgacggttcactgtattcatatttgtcgcaccgtcgttaggcgtgttgcggtaatttacattctgggtgcggttgtcatttcgttttccttctccctggttccccatactgcaccctgcggtaatcagcatcggcagaagaagggcagagataactgcttgcttttttatcatgtgaattcctcctttctcactttacgtataggtttttctattcggcgggatttatgcacgccgtttgcattctgagcggtttggataaatatcagaaggaaagggaaaggtaagcgtaatcaattgaatgaggagggatttaacttgttcagaaaaaaaagcggcgtcagcccgacagcgctgctgatcggatcatcgattctgattgcagctttatcacccgaaatccgccggaaaatctccggaatggtttcaggccgaatgcagcataaagatggtacacactccatgcagcctgctgacctgattcaacaggcgttcggcggggaatccggcggacagcagcacacagacaaagcccggcattcacaaaccggctctacgcagcctgccgagctgatcaaacaggcgttcggcggggaatccggcggacagcagcatgagcagacttcccgcaatcactccggctcatcccatacggacggccaggcagaccgcagccgcagtaaagaaacttcgccgaagcctcactataccgagccgattcacttcgaagaaagcgcggtaaatgttttaaatgacagcaccgtgatgaatatgctggaagaaattgaacccggaaatcattagaaacgaaaaaatccttcattcgttcaacgatgaaggattttttcgttttagcgctctatctcatatttttctataagagaatgaaccattgatctgcttttttgttaagcttcttcagcttcaatgacgattgaggaatcattgtacaccgcggtatcggtttccttcgtcattttacttgttaacagccctgcggtcatactgccgctgacatttaaggcggtgcgccccatgtcaattaacggctcaattgaaatgagcagcccggcaagcgcgacaggcatgttcaaagcggataggacgagcagagccgcaaatgtcgcgccgcctcccacgcctgctacaccgaatgaactgattgccacgatggcgatgacggagatgataaatcccggttcaaacgggttttgccctactgtcggcgcaatcatcatcgcgagcatcgccgggtaaataccggcacagccgttttgaccgatcgataagccgaatgaaccggcgaagttcgcaattccttccgggacgcccatgcttttttgtgttttaatattgagcggcaaagcccctgcgcttgaacgggacgtaaacgcaaacaccatgacaggaaatgcttttttcacgtatgtgatcggatttaaaccgctgaacgtaatcagcagcaagtgaatgataaacatgacgataagcgcggcgtatgaagcgatcacaaacatccccagtttcgcaatgctgtcgatgtcgcttgtcgcgatcgtctttgtcataatcgccaataccccgtaaggcgtcagtcttaaaattaatgtcacgacgcgcataataatcgcgtataccgcatcgacaattccgctgaaagtcgcagcgtgctccggctgtttccgtttcacgcccagaaaagcgatgccgaggaaagcggcgaaaataacgactccgatggtggaagtcggtctggcccccgtgaaatcaagaaacggatttcccggcagaagctcaacgatttgctgaggcagcgttttggccgtcatatcctcagatttttgctgcagctcctggcctcttgataactcggtgcttccctggtcgatatgaacggctttcagatcaaaggatagcgccgaagcaattccgactgccgcagcaattgctgtcgtagcgatcaaaattccgatgatcagtccgctgattttcccgatgttatgggtcagtttcagcttcgtaaatgcgccgagaatagaaataaagactagcggcatgacgatcatctgaagcaatttgacataaccgccgccggcaatattaaaccaatcggccgttagtgtcacgatatgtgaagccggcccgtaaatcaattgcagtgcaaaaccgaatacaatgcctagtccgagcgcggtaaagacacgtttagaaaaggaaacgtgtttcttttgcatgacaaacagacctgctataagcaaaagcataatgaaaacatgtaagactataaataaattctccaaaacaggtaaacactcccttgctcattatcctttaacactatattatatgaattccgatcggtcaagtaagaattgacaaaatatgtatttttatagacttttctcttttctttccaccctttctctagtaacttatataagggtgattgttatgctgaaggaactgtttcttaatttaacgattttaattacatttaattatctcttcacccttctttttaaagagtcgctttcgtataaagaagaccgtctgatctttcaattactgaaggggacggtctgcgggcttttaggggtttttctgattgctttcggcttttcttactccgattccatcattgatctcagaaatatccccattatcatcgccgctctttacggaggctgggtgtctacggcagccgcctttgcgattatcgtcgcaggccgtatcctgatcaatttcaatacaagcgccattttttccatcgccgccgtcggggttattgcgatactttctgcggccgtcctcagaggaaaaaagccggatcacaaaatggcgttcgttatgctgcttttttcaaatgttattttcaccctgacgctgctgtttcttatgcctgaacagcctgccggggccctcgtttattattggcttatttccaccttgggcggaatgctgtcgctgtatatcattaaacacgaagccgatgcccgccttttgttcaagcaatacaagtttcaagcgaattatgattttctgacggggatttttaataagagaaaattcgaggaagtctcgcgcgttctgtacgatcgggcgtctcaatccccctcgtctcagctcgcgcttatttatttggatattgatcactttaagcagatcaatgatcaatacggccattatgaaggggatcgagtactgaaagaactggggacgcgtctgaggttcttactcagcagttctgacccgtcagcccgcatcggcggcgaagaatttgccgtgcttatgcccaattgcacgtatacaaaagggcttcacctcgcagaagaaatcaggcacacgattgacgcgaacccgattctgctgacgagcggagatacaattcccgtgaccgtttccctcggcatcgcgcattatccgacaaatacatcggatcctcagacattgcccctgatcgcggaccggatgctttacaaagcgaaaacatcagggcgcaatcaagtgtgcagcactgaaaaaaaagaatgatcgcccgaagaggaaatcattctttcttttcagtgagaaagccgcctttcaggaaaacaggaatcaggctgccctcatattctttttcaataaacgccgcggtatcatctgattgatacaaagacaggagtttttgcatccgttcatcatctttatcctcagccctgacggcgatcagatgaatatacgcttccttcatttgcgccgatcggatcagcgcgtccttctccgtatgaaatcctgctcttttcgcctcgctttgactgagaactgctgcgtcagcatgttccgccgcctgatatgcgttcttttttgtttccgtttttaaggtcagatgcttcgggttgtccttgatcatatcagttgaacccgtaccggtgaatccctttttcaatgtcatcagtccggcctcctgcatgagaaaaagcgccctgccgaagtccgccgcttcaccaggcacggcaatgaccgctccgtccggtatatccttcagccgtttatgttgcttggaatacacccctagtgatgccgcatatgtcgttcctaaaggagccagcttctttttcacatgaggcggcaaagattgaaaataagaaacggattgaaacgcattggcgtcgagatccccgccggcaagcgccaaatcggcctcggcataatccgaaaacgttaccaaagaaagctgcaatccttcctcaccggctttttccgcgacaaactcccagatcgattgatcagattcattgatcccgatagtaattgtccggttcccgtcaggataatggcatgaagtaagtgatatgatcaaaatgaaaagaaacagactgtttataagccgcaggttcaagttgacctactccctatctatttttatgtacagaggctgcaccatgatattcgggctcatgattacatacaataccgatttaaaaaagggttgtcaattgcttccttaagaggctgcaaagctgtttttatcagctgaaaatgggctgttctagtctcaaatcagatttccgtatcagagcgttctcctcttaaaacatgttatttcgaaaaaagttacatttagcagttgttttttcttcgaattactggtagagtaaaggtaattatttttgttcgaactatctttaagaagaaagttttgtaagagttttcgtcttggaagtttgttttagagcaagaatagtgaatttaagcgttatgtcgctttaggaggaaatttcatgttagaaggtaaagtaaaatggttcaactctgaaaaaggattcggattcatcgaagtagaaggtcaagacgatgtattcgttcacttctctgctattcaaggcgaaggcttcaaaactttagaagaaggccaatctgtttctttcgaaatcgttgaaggaaaccgcggaccacaagctgctaacgtaacaaaagcataaattgtttaaaaaacctgccggtgtatgccggcaggttttttttcatctaaaacgaaaagctgttttgcctttgcaaaacagcttttttatatcaggtggcaatatcgcgttttaagaagacgccgaatgcgagcgccagaaaaataacgaagtaaatcacaagcatcacaaccgaaaatgtcatcgtcatcccctctactaaaggagtcccgttcatatattgcgacaaatccgtgttcgcaaataaaatatatttggtccattcaaatttcgcagcaagaaataccgtcgccgtgttccccataaccaatagaaaaatagaaaatccgaccgctaatgagctgttccggaataccgcagacagcataaacgccatcgttgcaagcataaaagcggagacagattcatagacatatgttttagcgaggaaagcgatgatattttgctcaaaaacatggccgtctttgtatacgagatgaacatcagccgcaggatctccgcctgtaccgaaaaagaccaatcccagcagagcggagccggcaaataaaatcacaagcatcagcagtccgaacagcagcaccgtcatatatttagatagcaaaatctgaaaacggctgagcggacggatagccagcagcttgatcgtcccccagttgaactcattcgccacgattcctgcggcaatgataatcgtaaacagcccggtcaaaacagtcatcatcgaagaatcagctacgtatgaccacactgtgtaccctgtatcctcggggatgttatgatccatacggtattgatttatcgcgacattctgtttcaggttatcaatgagcgtctgatttccggtttccttcatctgctgtttcatttctttgttttcagcctggagctcctgtttccaattcggattggcttcgctcgaggtgaaatggtttgacagaagcgcaaaaccgatcatcgaaacgcctaaaattacaatcatagcccacgtgccgacgcggctgaaaatttttatccattcattatagatcagcttaaacatattgaacctcctctttcgtcccgccggtaatttccaagaaacggtcttccaaagattttgtcatgattttcacttcatataagcggatgttttcacggacgagcagtgatatcacatcaggcacttcctgttttgacagcttgatctcaatgccgtttgtcttcttcacacagtcaaactgactcagaacggcaagagcctcttctctttgttcaatatggaagaagtatgtatctttatcctcttttccttcatcccttactttttgaatatcgacaagctcccctttttgcagaatgccgattcggtcgcacattaactccatttctgacagcagatggcttgagacgatgacagccattcctttttcacgtgtcagctttttcagatggtctctgatttccctgatgcccgcgggatcaaggccgtttgtcggttcatccagaatcagcaccttaggattatgcagcaggctttgggcaaggccgagacgctgtctcattccgagagagtaggtttttactttgtcatgtattctatcctgcaacccgacgagctcgatgacctcatctattttttctttcgtaacgccttttaccatccttgcgtactgctgtaaatttttatagccgctcaggaatttgtacagctccgggttttccacgatggccccgacgtgcctgaccgcttttgcatagtttttcgtaatggattctccgcagattacgatgtctccctgagacagtttcattaacccgaccatcattctgatcgtagtggttttccccgctccattcggccctaaaaatccaaacacttcgcccgcccggacggagaagctcagatcatgaataatcgttcgtccttttatcgttttctttacctgttgcagttctaataccgtttccaattagaatcccccttctatttcgtgcgcctgcatgacgcttctgtaccattgcagcacggacattccttcttgttcccgaatttcttcgacctcgcgccgttcagcgatttccccttttatgaaaaccatcacttcgtctaacagcgtctcaatctcgccgatctcatgtgtggcgatgacgacgatctggctgtcaaaatcaatataagatacgagactgttgacaatcgactctctgaccgccggatcaagacctgaaaacggctcatccagcagaatgacggatgcttttctcgacagggccaaaacgattttcagcctgccccggctgcctttggacagctcttttatcttctgcttcgctgaaagattcatttccgttaataggttatgtgctttttccagctgaaaatccgggaattgcgaatgataaaatgtgagcatatcaccgacggtcgtccgggcggaaaacatatcatgttcggttaaatatgctgtacgaaacagcatgttcctgcttactgcgcagtctcccatccggacggcgcccgatgtcgggaacgcaagcccggcaagcattttaagcgttgttgatttcccgcttccgttcggccctaaaattccgtagattttacccggagacaatgaaaatgatacatcgctgaccgcgagcctgcggccgtatttttttgttacgcgttcaaaatcaagattcatcgtttgcttcctccgcatattgtttgatcccgtcgagcatttcctcaggagataaccccagttccgccatttcctgaataaagcgtttgaaaacgtcttttgtcagcctgtctttcagctccgctttcagatcggatctttccgctataaaggttccctgtcctcttctcgtctccacgatccccagcctttccatttcactgtacgttctttgtatcgtgttcgggttcactttcatctgtacggccatctcccttacggacggcagtttgtcccccggtgaaagctcacttcggatcagccggtaatatacacgatcggcaatctgcagataaatcggcttggatgactgaaattcattctccatcattacacctcaacctttcgattcagcagcatagaggccagcgcgagacagagcgccgcaagcacgatcactgccaggaagctgaaaagcgaaatgtggacggctttcagctccatcgtccatccggtcaattttgtataatgaaaatcaaaattcgcatacacttttaccggccataaatcatgttgagatgaagtgaaaggcgtaatgattttatcgtcaatataggtccagacaaacgcaagcacgatgcagatcacccaacggaggacgggaacatgttttaatgagtgaaaaacagtccaaaatacggccacgatcacagataagtacgctgaactgatcagcaggtaagcattcagtccggttaatgtgccggccaggggaatggtgtgttccagcgctccttttgcagaaagcatccggtacatccaaatgccgtagccggtcagcgccagctgcccgatcaactgatacagcagtgaggccgtcagcttggaagccagcagataaaatcctccattcggattgtaaagccacagctggttttttccttctttatgaaggtgatagtacataaacagcggcgctacaagaaattgaaaaaaccccattgccgcaaaaaagccgaaaatgacgagcggttctttctgacgggcagcgatgacgtgggctgcaaacgcccagcaaatcatgccgcaaagccacaccgcgagccaaatccatgaaaccttcgcatcttttttcagcaaacctaaaaacgatgtcattcttgctctctccattcggatcaagtgtatgagtaacatagtacactagatcatcatgtattacaatatcttcaataaaaaaagacaaatccgctattacgcagatttgccttttcaattacttctttttgttttttaaggagagcagcgcatcacgatagctgctatcctgcattttgccgccgctatcaggatcgtttggttcctgatccgtctcagaagtcttaaacttctgaagcgcctgacggtacacatcatcgcccattgtattctttttctcacggggagattcagattttacaacgacgggagcatgctcggctgagcgctcctcggccggatcatgcttttccggctgttcggctgtagtgccgatcgcttctctcttttcttctttgacatcctgtcctgcagaagtgctgcggacattgaatgtgataagaagtgcaatcacaatgacagcagcaataaccgctataataatggccatataaccctctccttactgtcgtccggcagttagattacctgtgacttggctgacacgtctgccaagcgcacggcctaattgaaggccttcttccgtcatcagcacatcgctgtcaaccgggcatgtgacgcccgcgccgtagtaagagccgtacagcgcgttttcaggaacgttgccgggaagtccgacaacaatcatgccttggtgaaacataggagtgatcagattgtgcattgtcatttctaatccgccatgtgttgtcgccgtcgtacagaatacggcgccgactttatcaatcagctcgccttcagcccacagatagccgagtctgtcgatccacgcttttaagcctgaactgatggtgccaaagtgtcccgggcatccccagataatggcatccatgtctttcagcttgcggatgtctgcttgatcgacatggtcgatcaggacttcagcctcagcgttttctcgtgctccttcggcaatggcttcagcaaggtgttttgtatgttcgccttcactatcgtacactacgtaaattttcattcaggaaacctcccattcagatgattaagattccttcacttctttaggggccggaagcaatgacagctcctcttttttcttcgcccgctgtttgtctttccgtacgtcacgcaagaacaggctcaggactacgccgataaccgcaaagatcgtcgcccacataaacgcgtcattaatccccataacgttggaattaagtgaagctgttttgtagagatatgaataaacggtttgtttcgccgcatcaagcgacatgttcatgttgaccattaaattcgaaaccgcgctttggaacgactgcatgaagctcggatcagccgtgcttgttttatccgcaatctgcgaatagtgcattgtcgtacggttcgtataaatcgttgtgatcaaacttgttccgattgaaccgctgatctggcggagcgtgttgctcatcgccgtgccgtggctgttcaaccgtgccggaagctggttcattccggctgtcataacaggcatcattaacagtgacataccgaatgcgcggatggcatagacaagcataatgtgcgtgtaaggtgtgtcaattgtcaattttgtgtactggaatgtcgttgcgaccgtgatgaccagcccgataatcgcaagcggtctcggaccgattttgtcaaacagaataccggaaatcggcgacatgatcagcatgacaatcgcgcccggcaatagcaagagacccgattgcagcgccgtaaagccgactaagttctgcaggtaaatcggaagcaggaacattcctgtgtaaagcgcaacggtaataatgatgttaatcacactggaaagtgagaaaatatcatatttaaatacccggaagtcgagcatcggtttttcagagcgcaattgctgaatgacaaacgcggcaatcgcgatgacaccgacgatgacggtagacagcacgatcggatctccccagccgtcgctgcccgcttcactgactccgtaaagcaatgaggcaaatccgacaatggatagaatcgcacccaagctgtcgagtttgattttttgcggttccaccaagttcttaaagaggaaaaacgctatgataataacgattgccccgatcggaacaaggccgtagaacataatgcgccatgtgtaatgctcgatgatccagccggaaagagtcggtccgaccgccggagcaaacatcatcgcaagaccgaaaatccccattcctttccccctgctttcaggcgggaagataagcagaatggttgtcatgaccagcggctgcaggataccgccgccgaccgcctgaattaaccggccgatcagcatggttgagaagttaggcgcgattccgcagactaacgttcccgctgtaaaacagaacatggctacgagaaagaggcttctctgtccgaaccgggtaattaagaacgcagataacggaatcaaaacaccgttgaccagcatgtatccggtcgtaagccactgaatcgtcgtcgcactcacaccgaactcggtcattaagtgcggcatcgccacgttaagaagcgtttggttcaagatcgccaggaataacccggccataagcacaataagcaatgttttaggactttttacttgattatctgatttagccacctaagacaacctcccttcatggtttgatgactgatctgtattattcagagatttttacagatgcgttcataccaggaagcaccttgtcagatgggttgctgagtgaaattttaacaggaactttttgcgttacttttgtgtagttgccgcttgagtttgaagaaggcagcatatcaaatgttgaatttgtcgcataaccgatttcttctactgttccgtcaaatgttgtattaggatcgccgtcaacaattacgtctactttgtttcctacttcaatgtctctaatgtctgtttctttaatgtttgcagtgatgtaaaggtgtttcatgtcaatttcctgggcaattgtcgtaccggcttgcaccatttggccgtttttcacttcgtttttcacgattgttccatccatgatggcttttacgtcagcattttgctgtcctttgatttttgcaacaacgtcgtttttgcttacttctttcccctcatcaaggttccagtcagttactttacccgcagcaggagctgtgatagcagccatgtcgccggcaacttttgcttcatcggtttttacatagtgtgtgctttgataatagtagtaagcacctccgcctataattgcaagaacaacaatcaaaccgataatgttggtcagaattaaacgtcctctgttcattttgttttctcctttcgtttcttcctctatcattttgtggaatgatgataaaaatatgtggggatttttttattttccgtttttcactgcacagccgtttgcaagcttcgttaaactttccgcaagcttgcgcaggtactgcagttcagcggtattgagctgccggtataagaccgccgctttttcggcatattgaacagcagctttctttagaagttcttccccctcttcggttaactgaatcataacaacacgccggtcgtcgtgatagtcgctccgaaccattaggcggcgcttatacagaatatcggtcattctcgtgacagacgccggtttcagatcaagcgacaaagccagccttgaaagctgcgtgcttttgctcttatgtattttgaacatcagcagatactgcagcactgtaatatcaaaaggttcaagcactgtctccagaatcattttctgctttttgtaaatcgatctggaagtatcaaacagttgttcaaaactgagcaaagcgagctctgattcaatcaccgtattttcacctcattcccttaataatagttcacaagataaaatattaataaatgaaagaaggtttgtaaagagaaaagtttcattttttaaggattttttttatgccgttttttctctttatttttaatttaaaaaagccgggcgaagaaccgcggcccacgattcttcactcggctttatatttaatacgatgctttgcttacaccggcttcctcatttttaaaaaagcttttcagcgcttgaaatacgtctgatttctgtttcaggatgtagtatttaaatttatcatctttgacatttttataggcggacatgagggtggagtgcctgttatattgattgacctcaccgtaacagaacagattcgattttttcatgatgtcattgacgagctttacgcaccgggcgttatccgaagtcaggttatctccgtctgaaaaatgaaacggatagatgttgtagcgggcggggtcatatttttcatcaattaattcaagagacttccggtaaacggaggaacagatggtgcccccgctctcgcctttcgagaaaaaatcttcttcggacacgaccttcgcttccgtatggtgggcgataaattcgatatcaaccgtttcatactttgtccgtaaaaatcgtgtcatccaaaaaaagaagctcctcgccatatacttttcccatacgcccatcgaaccgcttgtatccatcatggctaaaacgacagctttcgattccggcttcgtcacatcattccatgttttgtatttcagatcttccggataaatagggtaaaacgacggcttgcctgtgatagcgtttcgtttataggccgacagcatcgtccttttcttatcgatattccctgtcagcccggttttccggatatcattgaactcgatatcggtatggacgatattgtccctttccttttgctgcagattcggcagttctaattcctgaaacagcgcttcttccagatccatcaatgaaacttccgcttcataataatcctcgcctgcctgatcgcctgctccctggccttttccggcaccctgctttttatctgcgccgtctcttgcgacgacatcgccgacttcgctgtcgccgtcgccttggccgacatgtttatttttatcatagttataacggattttatattcatcaagcgaacgaatcgggattttcacgacatcttttccgttggacataataatgctttcctcagtgacaagatccggaaggttgttttttatcgcttcctgtactttcttttggtggcgctgctggtcatcaaagcctttgcgatggagggaccagtcttcctctgaaatcaaaaaatttccgctgtcattacgggacatgaattcccctccttaaccgttatggtcgttttacatgtgtattccggcttggtcctgtttatgaaacaagtccggcgaaaagatttattttcatcttatgccggacggactctccaattgacaaacaattgcgaaaaacagccaaaagaacccgtccttttacagacgggcctctcaatgaaatcaaacatcagcggtttaacaagcttccgacatacttcagcagttcattagcactagtcgaattatagccgtgttcatctattaaccttgccactacctcattaacctttttaagctgctgctcatccggcgttttggttgaggtcgtaattttcaccacatcttttaagtctgcgaacagctttttctgaatcgcttcgcggagtctttcgtgcgaattatagtcaaagcgttttccttttcttgcataggcggatatgcggattaaaatttcttcgcggaacgcttttttcgcgttttctgaaatgccgatctgctcttcaatggatctcatcagtttttcgtcaggattcatttcttctcccgtcagcggatcgcggagcttatttttattgcagtacgcttccacattatctaaataattgtccatgagagttttcgcggattcttcatatgaatagacgaacgccttctgcacttcttttttagcgatgtcatcgtactctttcctggcggcggaaataaaattcatataccgctctttgtcctcggcggagatcgacggatgctggtcaagtccttcttttaaggaacgcagcacgtcaagcgaattgatcgattccatattttttcggataatcgttgaggaaatgcggttgatgacatagcgcgggtcaattccgctcattccttcatcgtggaattccttcttcatatcctccagatcaacggaattgtaaccttcaacgctttctccatcatagagcctcatttttttgacaagatcaatatcagaacggttcggttccttcagccgggtcaaaatagaaaacatcgcggccacttttaatgtatggggggcgatgtgtacgtcagaaacatcactttcagaaatcattttttcataaatccgttcttcctctgacacctttaaattataaggaacaggcatcacgatgatcctggagtgaagggcttcatttttcttattggcaataaacgagcggtactccgtttcgttcgtatgcgcaacaaccaattcgtcggctgagatgagcgcaaaccgtccggctttaaaattcccttcctgcgtgagtgacagaaggtgccacagaaatttttcatcgcatttcagcatttcctgaaactccatcattccgcggttcgctttatttaattcaccgtcaaaccgataagcgcgcggatctgattctgagccgtattcggcaattgttgaaaaatcaatactccccgtcaagtcggcgatatcctgtgatttcggatcagacgggctgaaggttccgattccggtacgtttatcctccgagaagaatatacgttcaacctttacatcctcaattctgccgccgtattcttcttcaagccgcatgacattaagcggagaaaggctgccctcaattctgatgccgtattctctgtagaagtcgtcgcgcagatgatggggaatgagatggagaggatcttcatgcatcgggcagcctttaatggcgtaaacagcgccgttgtctgtcaatgagtaggcttcaagcccttttttcagcatggtgacaagagttgactttccgccgctgacgggtcccatcaatagtaaaatccgttttcttacatcgagccgcttggcagccgggtgaaagtattcctccaccagccgttccagagattcctcaaggccgaacagctcccgcgagaaaaagctgtatgtctttttaccgtcatcctcctcgattccgctgtcttttatcatattaaaaacgcgagaatgagcagactgcgcgaccaatggattttcttttatgatctccaaataatcagcgaacgtcccttcccatttgagacgctgctcttcctctctgtacttttcaattttctttaatatatccataagaacctcctctatcatggttgatgcactagaaataaggtactttgttacaatctatgcggtgacgtgataatacatgcttttcgtttcttaaaaataaagacgttataaggccgtcattgacaagggtccggtgcaccgttcataatgaaagaaatacagtttcatccagactcggacatcaaatggaaaagcaaagaggaggagaaatgatgaaaacgatcattttacttggggtcattctcacttttttagtatccatttttacggcgggttacgacagcaaacctgaaaacaaataacggcaaaagggtgctcttcataaagagcaccctttcctgtacaacataacaatgtttcatatttgaatatgttcttggacagttgatttttcatgagatttgcagcttgtttgatactcgatttttccgattttgcagcccgggccgatttccacatgctttcctctgacgatgtccgcttccgtgtattcgaggtaaattgcgtctccttcgatcaattcagcagaaagcgtgccggctttccgtttaagaaaaccgggtttccgtctgacggtgatcgatgtgccgccgatttctttcacgcggcttcggtcataacgcaaatggatgtttacgtcccccgcgtttaacaatcccgccacattgatatatcctgttacatgaagcagctccgtctcgcaatcgccgccgacggtgagacttccttttatatgacactgctctcccgcggccccgccgccaatttcagcaagtcctttcagcctcatcgtggcgaaacgcatggagccgccgactttcaatgtgcccatcacatttgctgaacgtgctgataaatctcctgcaacttcatgctctccgaaaattttcagcctgttgatctcggcatctccgagaaaaagtcccgtaccgaatatccggcagcgttcgctttgaagtccttcgccgacagttccttcccctttaatgcttacattttggtaggagccgccggaggcgtgtccggctccgtacatttttaaatgactcaatttttttgtcgtttccatcgcagttcctcctatcgtttcacgactttgttaaccaaagcggaagggtcacatgtaaaatcgccgctgtattccacagtcccaatggtgcagcctgcgccgatccgcacatgatttccgcggactgtcttcgcgttcgtgtccgccaattcaatgatgtcaccttcaatcagctccgctgtcagcacgggggccggcatcagcttaaaacgcgtaagcacgctctttctgctcatcactttcaaatggcggcagccgatttctttcacatggctttctcccgccgtcagcttaatactgacttcatcggcattcagcaggccgccgatcttgcatttaccttccgaacggaacgtctctgtctcgcaatcgccttcaatcccggctttcccggatatgaaaatatcatcagctttcacaccgccgccgaaagatgaaaatcccgcgacgttcagccgctccgttttgacatcacctttaatgacacccgttccgttgatacggatggattcagcttcggcactgccggaaattttccccgaaccgctgatcgtcagcgtttgcgtcttgacatgtccgtctgtttttccgctgccgttaaacaaaaagctcgcgcactccacatcacctgacaccgtgccgcttccgttgatctccactgtatgaaaacggcctccttttgaacttcctgaaccgttgatgattaatttatctgttacttccattgatggtcctcctgcatccatttcgtttttaattcttccgatgccgaagcaagcgccacccgttcaaccactttgacagtcggttcaaataaaatctgttccgcgtcagcgatgaagcacgtcgttacgccaagctttcggagcatgacaagctccgtatttgctttcagttcggaagcctcatacgttttcagcacccctgccgccaatttcccttcctcaaggctgatattgcccgatcgcaaaagtccttcaagcacatataaagacagcagcgcgcgggacgtgaatgtcacgccgtcttcgccataaacttgcagcgcagcctttgaaatcagtcctttttgaagcagctccgcagacgttatattgacatcagtcatttgcggagacagcatttctctcatttcatccaaagacagattttctttcattttctgtatttttgagatgcgttttaatatttccgctctcggaaaaaatgtttcctggcctgtaaatgttgattttcggataaaccattcttcaggaattaaatttttccgtttccagcggtacagctgtccgtatgaaattgatgtttcttccagcaattcttttttagaaatcagttgttcctccatgaatccagctccttcgatgaatgtattgtaacataacactgttacgttgttaagcctggaaatataaaaatgccgtgaaccgctgctgtccgtcttttttattcaataaaaaaaacgcccggatgcgggcgttttttctcacgtcaaatctctgtaattttgctggcgcagcgcttcatatacaagaatcgcggccgtgttggacaggtttaatgatctcacatgctcggtcatcggcagacgcaggcagcggtccatattgttttcgatcaattctttcggaagtccgctcgtttctctgccgaatacgaagaaaaagtcttcctccgtatttgagtaatcaaatgatgtgtgcggcttttggccgaattttgtaatgaagaaaaactttccgttctcatatgcctcaaataactcttccaatgaatcatgatatacgacgttgacgaactcccaataatcgagtccagcgcgcttcagcattttatcatcggtcgagaatccgagcgggcggatcaaatgaagcgttgtgtctgttgccgcacaagtacgtgcgatatttcccgtattggccgggatttcgggttgatataaaacgacatgtaatgccacgatgttcacctctgttttttattccgcccaccattatatcattaattactcttttgtcgtatcatccgtaatatgaaaaaacgcatatctgatggaaggagtatacgccgttgaatcctcatatgaccaatatctcattctgctgtcatacgtttgggcattgacaagcggcatattgcttttatctttcgcgaccacgatcgtcgtatgattaaaacggccgtctccttcaaaatcatagcaaatgatatctccgggcatcagttcttcagctcttgatacttgcaccgcgcgaagcccggccttggattgggccagatacatcttcatcgaatgcgcgaccgtccagctgtagctccacgagcttgccttcatccaccagcctgagcctctgttcggatgcccccgcatcggtgcttttccggcatgtaaacattgggaaataaaattagtgcaattatcgctgaaatttttataagcgggatttcgtttattccaaaacttctccgcgtactgcacggcagccagacggtcgtattgaaacgcccgcccgaaatcttcccgttcactccgctcatattcaattacgctgttcccgtcagaaaatcccgccggttttttctttacttcccggtctttaatcaacagctgatcatagagaaatgcagtccgttcctcaatctgctcttctaagtaaaggtgtccgtcatgctccttgcacaaatattcgaaatgaatcgtgtacatgacgcataacgtgccgtcgtcctcaaggctgcttttgacaatgacggcttttgccttcgctttcacgatgtcaactttccgtttttcaaacagctctttttttctcgtcaggacctcaagatcgccgggctgcccattgtgcctcatctcggttccgttgattaaataatgaagccgggcctccgctaaatcttcaataatatgcttcaagcgctccacccaccatactgttttataaagaaaaaacacttgaactccggccaagtgctttttctctatacatatgtcaggaccggctggttttagtcttatcagaaaccgataacagctccagtcccttttcaatttcccgtatggcttcctcatcctgctccttttgaagcgctttttctaattcccccgcataatcagggtcaccgattttcccgatggcccaggcggccgtacccctgatgacgggacgcggatcttggtgcatcaaggccgttaattccggaagagacgaggcatctttaaaatgagccaaagctaaaatcgcattccgctgtatcggcttcttgccgcgccatgatcccgatacatgtccgaatttttctttaaattcgcggttgcttatggtcaaaagcggctttaacagcggctttgcgatttccggatcaggctccatctgcggatgaagatgaaaatctttccccttattaatcggacagaccgtctggcacgtgtcacagccatacagacggtttccgattttcgtgcggaactcatccggcaaaaatccctttgtctgggtcaggaacgaaatacagcgctgggcgttaagctgtccgggattgacgagtgcgccggtcggacacgcgtctaaacattttgtgcacgtaccgcacatatcttcaatcggcacatccggttcaaagggcagattggtgatcatttcagccagatagacgtaagaaccgtattcaggcgtggtgatcatgcagtttttggcgctgaagccgattcccgcccgttcagccacggccctgtcagacaattcccctgtatccaccattgactttgtgcggatatcctcatgtttgctttggagaaaattctccagcagatcaagcttttcccgcagcacgtcatgataatccttcccccaggaagctctgcaaaaaatgccgcgccggccgtccctcgtgctcctcggggcatctttcattttggaaggataagcaagggcgatggcgacgattgatttggctttcgggagaagcaaagacggagtaacccgtttttcaatatccggttcttcaaaaccggataaatagccgagtgattcctgaagaatcagccggtcccgcagactgtcgaacgtatcagccgtcgtaaacccgattttgtcgactccgatgcttttggcatattcgattaattcctctttcaatttatgaatattcattttttgcacagcctcctttctttgtgatcaggctcccgcacaggtataatagagttttatcatcccgaaatggagtgaacacacttgaacatcagtttagatccacttattgctgaacgggtgccggggatcaaagcggcagccgtcttatatgaacagatcgaagtcgggcctgctccgcaaatgctgaaaggccgcctccgtttatttcaagaatctctttactttgattatgctgacggcggtatagatgagcagccttttgtaaaagagtgggcgcgtataatggaacagctcagtcccgccttttcaggacaaaaaacgccgatggagcttatgctcggcgatatttcccgggaacgattcattgaaagtgtgaattcagcccatgataccatactttttttctccttgaaatattcattgcctatcatggcgtatgatgccgcagaaatagatgaaccaatttcaattacgatcggagaaaaagaaagtgtactgtccttctccggcccggacggcgttttcggcgacttcaccggacatatcaatacccgccctgtcacgcccggcacaaagaaaatgctgcagctgatctttttcccgccttcatttcatgccgacgcggcggatgagctgctatcatccttaacaaaaatgtttgaacaaattcacggaggcacgcataccgtctcttggctttcataaaaagacacgcctttcgtgtcttttttcacataaaaaaacgcaatacttcgtttatcagagaaacgaaacactgcgttaataacgtatgtatggagcgggtgatgagaatcgaactcacgacatcagcttggaaggctgaggttttaccactaaactacacccgcatcaaagttcttttttgtcagtagcgatttgatgtttctaatattacatgtatatttttttttcgtcaagggaatgttaaaaaatttgtcgaaaaaaattctttttttgtccacatgttaagttaggtttacattttgttaaatatctcatacaatatgaaaaagaagaaacttgaggtacgcctgatgatgaaaaataaagtaaaagagctgagagccagattcggctattctcaggaaacgctcggaaaagaagccggagccaccagacagacgattgcagcgattgaaaaaggagattatgtgccttcacttttattggcgcttaacatctgccgggctttctccctgccgatggaggaagttttctggctggaggaggagaaaaaatgagtttgaaaataaaagcgtgttttcaccttgcactctacggattggcctgctggacgcttatttccttaatggaagcggcgccgcggatcgctcagtttttccaaacggaggggagcggttcatttgagctgaatatcactccgtttctgctgtttaccgtttgtgccgcattgtatatctatgccgaaaagaaaaaacgaaacggcaaaaagcacaggcttgtgcccgatgaatttgaggaacaggatgaaagagaacgaatgatgacggctaaagcttgccgttcctcgtatatcgccgtttacttctcattgccggccgcagccgttctgcttttgttttatccgctgattcagccgcatcttcccttttttccgattcttttgattttcattctgatgatgattcagcatttggcttatgttttcacttttcataagcacggcaaaaactccggttcatgacagatccggagttttttacattaccagctcgcttttttcaccccgggaacccggcctttatgggccagttccctgaatgcgattctggacagtttaaattttctcatatatccgcggggccgccccgtcaccgtacagcggttatgaagcctggccggagcagaatcacgcggcagtttgctcaacgcttcccagtctccttttgcctttaattctcttcggatgtccgcatattgttcaacaagcttctgccgcttgagctctttgatcacttttgatttttttgccatttcagcactcctaacaaatcgtaataattacgttttgtatcatatcatccatatgagtatcgtgcaagctaagcgcttaaaaaggcgggtgaatacccgccttcactgccggaatttccccggaaatgaaaccgcagaaagcgcccgccgtcaattatccgccttgcgacgtcatcagactgtcgctttatttcctcttgcaaaatggttgttgcccattgcttcacccagtctgcgctcaagctttttagtccgttcattctgaaacggcagaagcggaaacacgagttcagccagataataagcttcttccagatgcgggtagcctgaaaagataaacgactcaatgccgagtgcctgatactctaaaattcgagcagcgacggtctgcggatcaccgacaagcgccgtgcccgctccgcctctgaccagtccgatgccggcccagagattcgggctgatctcaagcttcgagcggtcaccgttatggagagcggccatccgtttttgtcccgaagaatcagcgcgccggagcgcagcctgcgctttcgcaatcgtctcttcgtctaagtggctgattaatcgttcagccgcttcccatgcctcttcctcagtctcccggacaatcacgtgaagtctgatgccaaaacgcatcgtccttccttccttggcagcctgttttttaacggtttcaatcttttcttttacctgctccggcggctctccccatgttaaatagacatctgtatgtttcgccgcagcctcaattcccgcctgtgatgaaccgccgaaatataagggcggatgcggagactgctttggcggaaacagcagattgctgttttccactttgatatggtccccttcatatgtcaccgtttcgccccgcatgagtccgcgccagacggttaaaaattcttcagtcgccttataacgttcatcgtggctgataaacatgccgtctcccgccagttcataaggatctccgcccgctacgacatttacgagcaaacggccgtctgacagccgatccattgtcgacgccattctcgcggcgacagacggctgcatcagtcccggacggaccgccactaaaaatttcaagtcactcgtttcccccgctaaagcggcagccgtcagccacgggtcttcacatgatctccccgtcggcagcagaacccccgtatacccgagtctgtctgccgcctgtgccacttgcttaaaataaagatgatccgccgttctccctcccgtttgcgtccctaaataccggccgtcaccatgcgtcggaataaaccaaagaatctccatatgaatctctccttttttaataggttacccttcataactgttccgccattttaatagtttccgttcgagcattctgaccaatgcatctgtcagcttgccgacagccgcaaaaatgataatgccgacaaacaccttatttgtctgtgaaaattgtctggcatccataatcatataaccgacgccctcgctcgatcccatcagttccgccaccacgagaccgagccacgcaatgcccagagagagcctgatgccgagcaggatattcggcagagatgccggaagaattaattttgtcatctgctgataccagttaaattccagcacccgcgcgacgtcaaacagcttcgcgtccacactgcggattccaagaaacgtattaatgtacacggggaaaaaagcccccaatgcgatcagcagaatttttgatgtctcatcaaatccgaaccacaaaatgaacagaggagtcacggccaagtgcggaaccgttctgagcatttgcagagacggatcaagatatgcttccgtccgctttgagaaaccgaccagcagcccgaaaacaattccgaggccagcgccaagcagaaatccggcagccgcccggtataagctgatctctaaatgaccccaaagttcacctgaaagaagaagttcctgaaacgtctgcaagatgacgacaggcgacgggagcaccgtggccgagacgatgcccagacttgcgataaactgccatactgcgatgaccgcagccgggagtacaacccccttcatccattggtatgaatacttccgggatcttgccagagctttcttttctgattggcttattgcgccggcagccgttgatgcttctgctttcattacttgccatcccccgtttcaagcgcttttttaataaatgaattgtcaacaacgtcttttacatgaattttcttatgaatcgcttttgtttgatattgaaaatcagcggtttcctgctgggctttgacaatatcatcattgatcggttcattgagaggctcagtattgttaagcacgtttctgacgactttcggatcaagatgtttgattttcgcatataaggagacagcttcatctttgtgttccttttgccatgtaactgctttattgaacactttcagaaaaaggaccacctcatccgggtgttctttggaaaatcccgttctgactaacgtgaaaccgggagaatataaatctgtgctttctccgttcgccaatatttccgccccgtgctgcagcgtttcaatcgacaaatacggctcccaaatggaccatgcgtcaactgatttgttttcaaaagcggaaaccgcctcatcaggctgaagctggatgatggtgacgtcatcggcggaaagccccgctttatctaaagctttatagagaaaatcaaagccgctgctgcctttggctacggcgatttttttacctttcaattctttcaggctctgaatcccgctgcccttgtttacgagaatgccgtttgcctttaacccgtcctgagacagcccgatctctttaaaatcaattcctgccgcctgaccggaaatgaccggtgaattgccgacctgggaaaaatcaagcttatcggcggcaagaccttcaaattgcggaggaccgctttggaattcgacccattttacttttattccgtcttttttgaaggcctcttcaaaccagcctttttccttggcaatgagaagcgggcttaaactctgctggatgccgatccggatttctttcaccgttttcccgctccctcctgtcccgtctgcactgcatccggctgacatcatgactgctgcggctaaaagaatgatgatttttttcacttcgcttcgtcccttctatatcccggacccatccgcaaaccggaggtcttccgttttctcaaactcagaaagcaccttctgccggacggcctgaaaatccgctgacgtccgattgcgcggatgcggaagctgaatcggcatcaggctgtgcagccggccgggctttgccctgagaatcgccagcttatcgcctaaatagacggattcatcaatatcatgcgtgaccagaatcatcgtcgtttttttctcgcgccatatatcaagcagcacatcctgcaaatgttttctcgtaaaagcgtcaagcgccccgaacggttcatctaaaagcagcacctccggctcacgtaaaagagctctggcgatggcaacccgctgcgacatgccgccggataattcgcgcggataagcgttctccgctccctgcagcctgacaacctcaatcagatcatccacttttttccgaacggccgggtcgttcatattgagatcggcagcgatgttttgttttaccgtcagccagggaaacagccggtgctcctgaaagataaatccctgccggatgcccggtcccgacacattgcggccatttattgtgacagagcctttataatcggtatcaagaccggcaatcaattttaaaagcgtgcttttgccgcatccgctcggcccgatgacagtcaaaaattctcccgatgcaattgacagctcaatatcattcagcaccggcgttttccggccttcatgctcaaaagctttttcttgtatgctgatggttaaagccatctgtcttccccctctctttttgccgcgtgcgatcgaaaaacaaaaaggcccccatctccgattgcttgcagagatgggagccttcggcggtccgatcggcaacccgtttgtttttaaatttgaatatcatgttaattcaaattattccgacttgtcaactgttttttataaggattaaaatacgccctccggcataaccctgccagagagcgcatcggctgtatcacgtatttacttccttttcttgacgggcgattttcaataatgtccgcgcgttgttaccgaaaatgttttcaatatcttcttcccgcatattgatttcccggcaggtcctcacctgctcctgaagatatctgtatacatatcctctcggaaatccgttcgaatccgtcccgaagatgatccgttcagcaccgattaattcagatgtctttcgaaacagaatttccaaatcaagcgggtacggcatccacctcatccactgatttgagccggacgtgtcaatatacacattcgggcagctccagcacagctgcagcagttcctgataatatccggcgccgaaatgcggaatgatgaacggtatatcagcatactctctcgcgacgcgatagatggagagcgggttgatgttgcgatggctgacaatgccccccgctcttcctaaaagcccaaagtgaattaatacaggcagccttttgtcagctaaataagtccacagctttttcagcgacggatcatgaaactcgatgtctgtcagcggcccgaacagtttatatcctttcagaccgagctcttctaccgctcttttcagctcttcatacgcatcctcccgctccaaaggatgatatgcaaatccggtaaatctagcgggattggcttgaataaacgccgccatccggtcattgctctctgctgttaaaaaattcagcacgtcaatgccgtacttatctaattcattctcccatcttgtcatcaaagcgatttcgccctcatcgccatcaacatcatgcggatcaggaaagtcccaagtcagattcattctttctgaccgctcccggttataatcggaaaatgtcttatcgtttttgccgaaataaaggctgtacggcagatgaccgtgaatatcgacaggtttaaaatgctgtcggaaaagcatacaatcgccgcctcccttaccgcctgacaataaaaaaggcccttatccagtgaagaataagagcctcttgtgtccaagtcagcggtttctatttttcctcatcttaaacccattattcccgtcagtcaagtaggctttcaaaaccaaactcttttttcgataataaaaataattattttataatcattataaaataatattgactttttactgataggtgatattatgtttttataaatctaaagaggtgatcacatgagttcaaataaattgacaaccagctggggcgctcctgtcggagataaccaaaactcaatgacggccggcgatcgcggtcctgctttaatacaagacgtccatctgcttgagaaattggcgcactttaacagagaacgcgttcccgagcgtgtcgttcacgcaaaaggcgcgggcgcacacggttattttgaagtcacaaatgacgttacaaaatatacgaaagccgcatttctgtcagaagtcggtaaacgcacgccgctcttcatccgtttctcaaccgttgcgggcgaactgggctctagtgacacagtgcgcgacccgcgcggatttgccgttaagttttatacagaagaaggaaactacgacatcgtcggaaacaatacacccgtgttcttcatccgcgatgccatcaagttccctgactttatccatacacaaaaaagagatccgagaacacatctgaaaaatccgacggccgtttgggatttctggtctctgtcgccggaatccctgcaccaggtaaccattctgatgtcagaccggggcattccggcgactcttcgccatatgcacggattcggaagccatacatttaaatggacaaatgataaaggcgaaggcgtctggattaaatatcactttaaaacagagcaaggcgtgaaaaaccttgatgttaatacagccgcaaaaatcgcgggcgaaaatcccgattaccatacggaagatttgttcaatgcgattgaaaacggcgatttccccgcatggaaattatatgttcaaatcatgccgttagaagacgcaaacacatatcgctttgatccgtttgacgtcacaaaagtatggtctcaaaaagattatccgctcattgaagtcggccgcatggttctgaaccgcaatccggaaaattactttgcggaagtagaacaggcgacgttctctcccggcacattagtccccggcgtcgacgtctcacctgacaaaatgcttcaaggccggttgttcgcataccatgacgcgcatcgctaccgtgtcggcgcgaaccatcaggcgctgccgatcaaccgttcccgcaatgaagtgaaaaactatcagcgtgacggacaaatgcgttttgatgataacggcggccgctccgtctattacgagcctaacagcttcggcggcccgaaagagtcacctgaagataaacaggcggcatatcctgtatcaggtttcgctgacagtgtaagctataatcatcatgatcattacacacaagccggcgacctgtaccgcctgatgagcgaggaagagcgcgcgcgccttgtcgccaatatcgtcagtgcgatgaagcctgtggaaaaagaagaaattaagctgcgccagatcggccacttctacaaggctgatccagagtacggcagacgcgttgccgaaggactcggactgccatcaccaaaataacatcaaaaacctgccggtctgcccggcaggtttttgatgtttattatcaataaaaccgtttttttctcaattacacgaagtggcatgccgcaaaatgatgaagccctttttctgacagcgccggacttttctcagcacatatcttcttggctgccgggcatctcgttcggaatttacagcctgaaggcggatcagaggggctcggtatatcaccctttaaaattatccgctcccttttcgctccgggatcaggaacaggcacggctgataacagcgctttcgtataagggtgaagcggccgtgaaaagagctcctcttttgacgcgtattccacaatcgtccctaaatacataacggcgaccttcgtacataagtgctccaccacgcttaaatcatgagaaatgaacaaatatgacagcccgtgctgtttttgaaggctgctgaacaaattgatcatctgcgcctggatggagacatctaacgccgccacgggttcatccataatgataaattgcggcttgagcgccatcgctcttgcaatcacgatccgctgccgctgccctccggaaaattcatgcggatatcgatcgataaagtttgcggaaagtccgcaggcttcaagaacttccgccgctttatcacgcgcgttccgctttaccgccaattgatgctcgatcatcgcttcaccgatggcttctccgatccggcgccggggatttaaagaactgaacggatcttgaaaaatgagctgcgcttccgatctgaaagttttgagctcgcgccggctcatccgaaacacatcacgcccctgaaaaaacacctctccctctgttttttcatgaagcctcaaaatggtcttgccgattgatgactttccgctgcccgattctcccgctaagccgaacacttctccctttcctatcgtaaaactgacaccgtcaactgcttttacgggatttttgcgggtctttctcatccccccatgctcctcgtaatattttttcagccccttgacctccagcaacacatcactcatccgctttctcctctctgtaaagccagcacgccgcctgatgccccttcccgaattcagtaaaattcgggctcgatttccggcatatttccgtgctgtgttcacatcggtccgcaaaataacaagacgatcccgacaggtccgcaagctcggggacctgccccggaatggtgtacagcatctcccttctttgaccgataaccggcttggccgcgagcagccctttcgtatacggatgcttcggatcagaaaacagctttgcaaccggtccttcctccacaatttttcccgcatacatgacaatcacataatcagccatttcagcaaccacgccaaggtcatgagtaatgaataaaatagacgtgcgaaattgctttttcatatcccgcaataaatccaatatctgcgcctgaatggttacgtcaagcgctgtcgtcggctcgtcggcaatgatcaatttcggttcgcagcttagcgcgacagccgtcatgatgcgctgcagcatgccgccgctcagctcatgaggatatcggtgcataacctgctcggcatgcgggatctccactaacgtgatcagttcaacggccttccgccatgcttctttcttactcaacaacaaatgttcgcgaatcggttcggtcagctgctcaccgattgtaaacaccggattcaaagatgtcatcggttcctgaaatatcatcccgatttcgctgccgcggattttctgcatgtcttttggtttcaattccaacaggttccgtccggaaaaatgcaccgctccccgttcgattctccccgtctcgggaataagctgcataatggacaatgacgccatgcttttcccgcagccggactcccctacaatacaaaccgtttcctcctcatgtatcgtaaagctgacatcgtccacggcctttaccgccccctcctctgtataaaaagccgtttccaaatgcctcacttctaaaagcggttttttcatttcattttcacctgccgttttaccttaggatcaaaagcgtctcttaaaccgtctccaagcagatgaatcgccacaacggtcagaaaaatggccgttcccggcggaatccacagccacgggcggagtgtaaaatccataaaatgattcgccgcttccatcatgtttccccaagaaggtgtcggcggagcaacgccaagcccgagaaaactcagcgccgattcactcagcatcgctcccgccacatgcaaagtcgccgctaccagtaataacggcaatgtattgggaagcaaatgatagaggattttccgtttatcactaagccccaaaacttccgcggccatcataaacggctgctccttcagcgacaaaatctgtccgcgtacaagccgcgccaaaccgggccatccgatcaggcttaacatcatcataatcaggtacattctgtattcagaaggcactttccactccgacatcaccgcagccaaaatcaaaagcagcggcaggcccgggatggacatgagcatatcagcgatgcgcataatgatcatatcagcggctccccgataaaatccggccgcagccccgagtaaagaaccgatgacaagcgacagcaccattgaagcaagccccacagtcagagaaatctgccccgccagcatcagcctcgtcagcacatctctcccgtactggtcggttcccagccaatgatggattcccggctgctgattggcatttgaaatatccgtccgatctgttatgtacggagaaaaagacggcccgataaagcacaataaaaacataaaacataagaaaagaagactgatgaccgtcagcttatgctgcagcaggcgacggtacgtctgcttccaaagagaaggcggcacccctttttgttttttcattccgaacaccccctatttcagcctgacccgcggatcaaccgcggcataagcgatatccgccaagaagttccccacaatcgttaaacaagacaaaaacaaggtaaacgccatcaaaaccggataatcacgataatgcacagattccagctgaatacgtccgacacccggccacccgaaaatctgttcaataatgatggctccggaaaacagtcccggcagttcaaaagcaagcagggtgatggccggaatgagcgcgtttttcaacgcatgtttccagatgacggtgcgctctttcaatcccttcgctctcgccgttctgatataatcctgtctgatcacgtccagcatgccggagcggaaataccttgtcagcgagccgatgccgagcatagataaaatcacgaccggaagaatcatatgtctggcggcttcaagcacgtacgaaaaacctgtactcgtgcttccggtatcaatcatcccgccgacaggcaatattttcaaatccaccccaaaccacttaataaacagaaggctgataaaaaaagacgggaacgccatggaagcaaaaacaagaaacgtcacgatcccgtcaaaccatgagtatttcctgacagcggatatgacacccgttatcatcgcggctgaccatgtgacaagcaacgccaaaaacgcgacaaaaaacgaattccagacatatttccgaagcagtgacaggacgttctcctgatatttcaaagaaaacccaaaatctccgctgagcacatttccgagccacgtcacatagcgctgccaaatcggctgatccagcccgtaaagcgcttttaactccttcgctctttccggagtcagattgacattggaatcaatatagtcgccaggcagcatggcgaataagaaaaaaataataaaggacgtaccgaataagatcacaagcatttgaatgaatcgttctgcggcataccgtttcataaaaagcccctcctttccgctgaaagggcaaaatccccaggatgcaccgggtattttgcccaaccattctattgaattgagacatttgagagacttgaactgattccagtataattgtcaggctcaagcccttttatttttccgctgaccgcccttgcgctctgacggtaatgaatcagaatgtaaggcgggttttccccgagctcccggtacagctggtgataaatctcttttcttttgctgatatcaagcgtgccggctcctttctctatcagccggtccgctttcggattggaatatcccgttacattattgggatggccggaagccagcttttccaccgtgtcattcggatcaagaatctgcgaggtggaaacggcggcaaggtcatattgtttgtcatttattttcgcgacttctgtattaaaatccatcacttccggttttaatgcgattccgatgtccgcgtaattttctttcgctatcgggatgaaatcatcatccgctttagacgtgtaatagctgatttcaagctttttgccgtttttttcacgtacaccgtctttgcccgttttccagcctgcttcatcaagaagctttttggctttttcagggttaaacgcataccgattgacacctttgtcatcataagcccacgaaaccggagacaccggaacattcgcgacctctccgtagcgtttaaagcggacatcgacgattttttgacggtcaagtccgtaaataagtgcctgggacactttcttatcatgaaaaggcggacgcttgtgattgacgtacacaagcccgtaatcattcacgacagatacgcttatattggcaaaaccgagactttttaagtgctgaaccgtatcatcatcaggtgagaaagaagcgtaatcaaggtcacccgtttcaaacagctgaagggaagttgacggatcgataattttataaatcagcttttccgttttcggttttccggcataatagtgttcattagcctgatagcgtatttcctgtcccggaagatattctgtaaattggtaaggccccgctccgagcggtttggcataaagctcttttaaatagtccagtttgccgaatcgataattctttccgtagtaagcttctgacagcacctgcccgcctaaaagaagcagcgacttcgcactgactttctcagtcgtgatttgaatggttctgtcatcaaggacgcgaatgccctcaatcgtctttgcctttccttctttgtaagccttgccgcctttaatataggccgtggtgatatcttcatagcccgcgtatgcaggatcatgcagcagtgttaaagtgaatgcggcatcctttgcggtcagcggtgaactgtcgctgaaaacgagattttttcttaaacggaacgtgtatgtaagctgatctttggaaattttccagctttccgcaagagccggggcaggcttccccgttttatccagtttgactaacggttcaaaaataggatctgtcgcatttccgtcccagccgttttcgtaaaagtacggcagaaacacgccgcccggcgcggaaatcccagcaacaaaagtgtcagttctggctttcgatttagcgggaatcgccgccggatgagaagctttaaattcctttgtcttgacatgggcgatacgtgtttcttcctttttatccgccgcagatgacggttcttctccggcactccctaacgcgcatcctgataacatgatggataccgacagcgcgagtaccgttgtttttatcctccattttctccccttcatctttatcgaacccccgcatgcttttcatctatctttatataaatctgctccatctgttcctcatttctcataatctcccgtttgtttttctctacaagcagttcgaaattcaatgtgcgttttctgtacttttttcgttttttgctctttttacgcacatgtgataccttttttaacgccacttttcatccctccgcttttcatttcattcaatgactttcacgcaaaaaaggcccttatctgtttaaaagataagagccttcggtgatccgatcagccatcgtttggaaatatgtaatgattatgttaattcatacaatccctacctgtcaactataatttaaaatatcgtttccttccgggggttttcctcatacactctctcatttttccgcatatgctagaaaacatagcagattacaagtgaaagtgagtgagaatgtggaaaagacaacattgaccggtcgcatcgtcaaaaaagatgacccggactataatgctgcgagaaccaatatcaatttaagcctgcaaagatatccagacatcattgtgttttgtcaaaataaacatgacgccctcaatgcgctgagatgggcacgtgagaacaatgtgcctttccgtatcagaggcggaagacacagctacgaaaatttttccctgttaaatgacggactagtcattgatctcagtgaaatgaagaaaataagagtaaatgaggataagcggctggtctcgattgaagcgggagccgaattgggggaagtctaccggacactctggcggtacggcttgacccttcctgcgggaaccattgcgaatgtgggaatcacggggctgacgctcgggggaggaatcggatatttaacaaggacagccggacttacttgcgatcgtctcctccagctcgaaatgatcatagcggacgaaaaagcgggtgctgaattgatcacagtcaaccgttcaaagcactctgatctattttgggcgtctcagggaggagggggaggcaacttcggcattgtcacatccatgatgtttaaagccgtgccgatctcgtgcgtgtctgttttttctgtcacttggggctgggatgattttgaggaagtatttaacacatggcagcgctgggctccatttacagacaaccggcttacctcatcaattcagttctggcctaaggaagtcaaccgcatagaagcgctcggtcaatttaccgggacaaaggatgagctgaaagaactgctggccccgttaatgaaagcgggaaaaccgacaagcggcatggtcaagacagtgccatttattaaagcggcagccttttttaacagcccgggaggcaatcagccgcaaaagatgaagcggtcaggatcctttattgaaaaaccattatcatcacgcgcgatttctactttaaagcgctatttagagcacgctccgaacgaaaacgccagtgtctggcagcaatctctcggcggggcgaccggacggatcgctccggaccaaacggcattctactatcgcaacgcaatcattgcccaagaatatattacaacttggacatctgctgaagaagaaagacaaaatgtccgctggatcgaaggactgagaacgtccctatcaagagaaacgatgggagattacgtgaattggcctgatagagaaatcagaaactggctgcaaacatattacggagaaaatgttcaccgcctccgtcaagtcaaaacgaaatatgatccggaaaatatattccgctttgaacagagcattcctccgcttcgccgttcaccgtttttctaaaaaagatgaagatgggcaaactccatcttcatcttttcttttattgatataagcggcttcccttctctgcaaactcttttgctttttctttcagcccttcattgacggcctcgtcttcagtaagtccgttttccttcgcataatcacgaatatcctgagagattctcatactgcagaacttcggaccgcacatcgaacagaagtgagccgtttttgcgccttcagccggcagcgtttcatcatgatattccattgctctttcaggatcaagagacaaatgaaattgatcacgccaacggaattcaaaccgcgccttagacagagcatcgtcacggatctgtgcacccggatgccctttagcaaggtctgcggcatgtgccgcgattttgtacgtaatgacgccttctcttacatcatcacgattcggcagccccaaatgctccttcggcgtgacatagcaaagcatcgccgtcccgtaccagccgatcatcgccgcgccgattgctgaagtaatgtggtcataacccggagcgatatccgtcgttaatggcccgagcgtataaaaaggcgcctctttacaaatttccagctgcttgtccatgttttccttaattttatgcatcggcacatgacccggtccttcgatcatcacttgcacatcgtgcttccacgcaatctccgtcaattctccgagagtctccaattccgcaaattgcgcttcatcattggcatccgcaatcgaaccggggcgaagcccgtcaccaagtgaaaaagcgatatcataggccttcatgatttcacaaatttcttcaaaatgcgtgtacagaaagctttcctgatgatgagcgaggcaccattgcgccataatcgccccgccgcgggatacgattcccgtcgtgcgtttggctgttaacgggacgtaacgaagcagtacgccggcatggatggtgaaataatccacgccctgctccgcctgctcaatcaatgtgtcacgataaatgtcccacgttaaatcctcggcaatgccattcactttttcaagcgcctgataaatcggtaccgtccccacaggcacggggcagttgcggataatccattcacgcgtcgtatgaatgtcttttcccgttgataaatccatcatcgtatcggcgccccagcgaatcgcccacgtcattttttcgacttcttcttcgatagaagatgtaacagccgagttgccgatatttgcattgattttcacatgaaaattccggccgataatcatcggctcgctttccgggtgattaacgttagaaggaataatcgcccgtccgctcgccacctcttccctgacaaattcgggagacacatgctcgcgaattgcgataaactccatttccggcgtaatgatgccttttctcgcataatgcaattgtgttacatttttccccggcttggcccgaagcggtttccgctgtaggccggggtattcggcggcacggccctcttttttatagccgttgtcttcaggcttcacggtccgtccgttatattcttctacatcgccgcgcccggtaatccactttgtgcggagcgcccccagccctttaagaatatcaatctgtacatccgggtctgtatacggcccgctcgtatcataaacacggaccggcgcattctcctcttccccgaatgcccccgtagtcgcactcaggctgatttcccgcatcggcactcgtatatcgggcgaagaaccttctgcataaacctttttactgccggaaaaactcgacataatggaaatgttcgcttgctgtactgattgattttgcatacaaatctctcctttatcatttgaataacagaaccaagctcagcaccagcacaaaaaaaccgggttcaaagaagaacccgattttgcagtcagaaagaaactattattgttttcctcaacaataataaaacctctacttccccacgctggtacgaaccagatcaggtccaaagggttaagaagccgccgcttctctctcagcccgctcagacgggcacccccagtaactattgatttcgctctcatcgtaacacaagttgtgtacaaaaaaaagcatattatcaaaattcagataacgggacagtcataagctctgtttcccgaacgccttcttcggtattaaaaacccgataaccctttgcggtttcccgggaagagacagcctggaacagctgaccgtctttataatgaagcgcagcgccgtcatcagcggcatagccctccctgagtttcttttctgaaatcagacggtgatacaccggccggcgctccgcttctccgtcatagtgcggacaaaagctgcccggcaaaaatcctaaagctcttaactctctcaagtctccagctgaatccgtcaatccttcttcataccagcaaatcgccccggcgctgaaacccgccaacatgatgccgttttcccaagcctcacgaagaataaggtcaagcccccactctttccataagacaagcatattgcgcgtatttccgcctccgacatatataatatctttcttcatgagaaaggatctgagatcagaacccggcggtttaaacaacgacaagtgatccggctcacaccgcagcttttgaaaggcctgataaaacctgccgatataattctccgaatctccgcttgccgtcggcaaaaaacaaactttcggctttgaccccgccgactgctctaaaatatactgatccagcacaagatgatccggctccatggaaaagcctccgccacccattgcaataatctgcttcaatgtcatcacctctttttttctctagtataacagctcataaaaaggcgttatcccaatttcggataacgcctttaaaaagtatttgttatctgaaaaatgaaaacgcaccgtataacacaacggagatccctgcggcaataagcgccggaacaagcttcgaacgggcatacttcacaacatcgatccccaacaccgtacaggttgtcaccgtattatcactgagaggagaagcaaacgctccaaatgttccgctcgcaaacacggccccgatcgctaataataagctggtatgtgattgaactgccagcgttacgccgagcggcattaaaagcccccaagtcccccaggatgacccgataaaataggatataacagcccccagtataaaaagagacggcgcaataaacatatgggggatccaggacgttaaatgagaagtaacatatttcgagaatccaaggtcttcagatactgctgttacggcccaaatcagcgataacataataataacgttgaccaattcgtttccgcccttaataaaatgggtaacaagctcgcctgcatgaaaacgctgaaacataaaaagagcaaatgctgcaataaccgctgccaataatgcggttaacatgacgccaagcatatcgcttttgataaaagcattcaaaaacccttgtgcttttgaatggccgtcccaccagctgagaaagagtgttaatagcaaaaatagcccgatcggaatgattaaattccacggccgaatcggtgtttccttaatataagcacggtgcgccgaatccagctcctcctgctggtcagcatgctcatcactttcgaacattcccgtatgttcaccgtgaatatctgagatcgtccctgtttccatgttgaatgaacctgagccttttgaaagcaaaacaccgctgttccgcggaatcggttccgtatttttgttatgtttgcgagcagaagtttgtccgctcttttctgttttttctaagctttcgtccgctttttgtttcttaaaaaagcagtaataaattccgactactataatcacaaaggagaaaaaattgaagggaatacttttcacatacaccgtgtaagccgactgatctattcctgacgttttgagggcctgtccgataatagaaaccatgtagccgacaaatgccgttgctatcggaatcaaggcaatgacagggtttgccgtaaactcaatggcatacgcaattttctgtttcgacaggtccagacgcttgcttaaagctttcatgatcggtgcaattgtgacgatgcgaaagtccggttcactgaacgtgccaaatgtcgacagccatgcaagcagcatcgcgccttttttggttttaacttttttactgatcaaatggacgaatccttttatcccgccggtcagctttataatccctacaaggccggcaaatgaatatagaaacacaatgattctaatattattggtgacgacaatattactgattatatattgaaccatatgttcaatcccgccaagcaagctgggatgcaaaagatagcttccgaccagcaaaccgacaaacagaccggattgcacttgctttgtaatgattgaaatgggaatgaccagaataaatgggataagacaagcccaagtcccttccataaaaaacacctctttcaaagaacttcttgttagtatctttgaaaaaagcggatttatacaatctgcacgcgtatcatgttttcacaagctttggaggatattttcatacaacaaaaaaggcttctacatattgtagaagcctttgtataccggtggccggggtcgaaccggcactccagaaggaacacgattttgagtcgtgcgcgtctgccaattccgccacaccggcatgtaatgcgtcgtgttcaaccgacgtatataaatataacatgtatttcataaaacgtcaacgattttagcaaagtttttttaatggtaatgcagtatatacgatacaagcaagaaacttatattgatagtcattacgtttttattatataaaaaaagtgatctgcaatatgcaaatcactctcatatatattttataatgtgaaaattgatgaccaatttaacatagttcgttcaaagttaaattggtgccgagggccggacttgaaccggcacggtagtcacctaccgcaggattttaagtcctgtgtgtctgccaattccaccaccccggcaatagaaaggcgacacccggattcgaaccggggataaaggttttgcagacctctgccttaccacttggctatgccgccgtaatttggagcggaagacgggattcgaacccgcgacccccaccttggcaaggtgatgttctaccactgaactacttccgcaacatgtaaaagaacttaatacatcttatgctgttgttttttaaaaaatgcaactgggctagctggattcgaaccaacgcatgacggagtcaaagtccgttgccttaccgcttggctatagcccaatgataaaatggggcgattgatgggaatcgaacccacgagtgccagagccacaatctggtgcgttaaccacttcgccacaaccgccataatctgaagatgaataaataaaatagtggcaggggcagtaggaatcgaacccacaccggaggttttggagacctctgttctaccgttaaactatgcccctatttataaaatggtggaggggggcagattcgaactgccgaaccctgagggagcggatttacagtccgccgcgtttagccacttcgctacccctccatcatttagagtgccggccagaggacttgaacccccaacctactgattacaagtcagttgctctaccaattgagctagaccggcaaatggtggctcgggacggaatcgaaccgccgacacacggattttcagtccgttgctctaccaactgagctaccgagcctttttataaatggcggtccggacgggactcgaacccgcgacctcctgcgtgacaggcaggcattctaaccaactgaactaccggaccatttttttggttgcgggggcaggatttgaacctgcgaccttcgggttatgagcccgacgagctaccgaactgctccaccccgcgatgataatggtggaggatgacgggctcgaaccgccgaccctctgcttgtaaggcagatgctctcccagctgagctaatcctccatcatataagtgacccgtacgggattcgaacccgtgttaccgccgtgaaagggcggtgtcttaaccgcttgaccaacgggccctggtattttttcgtttgttatgtattgataattagtggcggagagcaagggattcgaacccttgagacggggttaccgcctacacgatttccaatcgtgctccttcggccactcggacagctctccataaatggctccgcaggtaggattcgaacctacgaccgatcggttaacagccgatagctctaccactgagctactgcggaatgaagtctgcctggcgatgtcctactctcacagggggaaacccccgactaccatcggcgctgaagagcttaacttccgtgttcggcatgggaacgggtgtgacctcttcgccatcatcaccagacgttttagtgacatgtattattatactatgtatttcagaaaaagcaagagtttttttgaaaaaaaattctctcaaaactagataacagtaagcatacattcaaattggttaagtcctcgatcgattagtatctgtcagctccatgtgtcgccacacttccacctcagac

SEQ ID NO: 31 - DNA, 1002146 bp, Bacillus velezensis
  source 1..1002146: mol_type = genomic DNA
gactacgcacatcgctgtgcgatttatttaaaactttgaattaacaggtacgttttgtcttgtttagttttcaaagaacttttttcacttctctcgaagcgacctcttaatcataacattttcagtttgctaggtcaatacttttttaaaaaatattttcgctaggcttgcctttctattaaaaagacaacaaaaatgattatatcagcatcatcactatgtgtcaaagctttttttcatttctttataaagtaaaagcgcagctgtaacaggctgcgcttttacgtttatacttcttccgtttcttccggctcttcttcattcttttccacaagcgccacagtggctacatgctcttgatcagacatgcggatcagacggacgccttgtgttacgcgtcccgtagtggagatatcattaatatccattctgattaacacgccgcttgccgtaataatcattaagtcctcttcgccttttgttgctttcacagttactaacggaccgttgctgtcagtgattttacatgttttaaggccttttccgccccggctttgaactctgtattctgaagccggtgtgcgtttgccgtagccgttttctgtcactatgaggacgtgggagtcttcttcaagaatctccatgcctacaacgacatcatcgtctgtcagcgtgatgcctttaacacccgcagctgtgcgtcccatttgtcttacatcttcttcagggaaacggatcagcaaaccgttcttcgttccgatgatgatttgtttcttgccgtcagtcaggcggacggccatcagttcatcatcttcccggagacctagggcgatcagcccgttattccgtatattcgcaaactgggacagtgccgtacgtttcgacaccccttgtttggtcgtaaagaagaggtattgctcttcatcaaacgtgctgaccggaataatggcattaatccattcgcctttttcaacttccagaaggttaataatcggaatgccttttgccgtacggccgtattcagggatttcataacctttagaacggtagaccttccctttattagagaagaacaggatcgtatcgtgcgttgatgtggaaattaagtgttccacaaagtcatcttcattcgttcccattccctgtacgccttttccgccccgtttttggctgcggtatgtggacgccgggagacgtttaacatagccgttatgggtcagtgtgatgacgatgttttctctctcgataagatcttcatcttcaattgtttcaagaccggacgtcacgatttcagtgcgtctctcatcattgaaacgctctttgatttcattgagctcttcacggatgatctcaagaactctttcttcattggctaaaatatctttcagctcggcgataagcgcaacaagtgattgatattcctcttcaatcttttcgcgctccagaccggttaatcgctgaaggcgcatatccagaatggcttgcgcttgtttttcagtcagtgagaattgttcgatcaaacctgttctcgcaatttcagccgtctgggaactgcggataagagaaataacagcatctaaatgatcgagagcgattcttaaaccttccagaatgtgagctctcgcttccgctttgcgaagttcgtaagccgttctgcgccggatcacaatcttttggtgatcaagataatgctccagacattgtttcaggcttagtaccttcggctgtccgtcaacgagcgccagcaggttgattccgaaagacgtctgcagggccgtttgtttgtacaggttattcaaaatgacgtgagcattggcgtcacggcggatctcaatgacgattctcattccgttacggtcggattcgtcacgcagatcggtaattccttcgatttttttgtcccggacaagatctgcgattttttcaattaatctcgctttgttcacctgataaggaagttctgtgacaataattctttcttttcccgatgatgtctcttcgatttcagccttagcccggatcgtaatggatccccgtccggattcatatgccttgcggatgccgctccggcccaaaatctgacctgcagtcggaaaatccgggcccgggatgtattccatcagctcctggtttgtaatctcaggattctcacttacggcaagcacgccttcaatgacttccccaagctgatgcggaggaatatttgtcgccattccgaccgcaataccggcagctccgtttacgagcagattcggaaatctcgaaggcatgacgacaggttctctttctgcgccgtcatagttatcttgataatcaatcgtatctttcgtaatgtcccggaggatttccattgcgatttttgacattctcgcttctgtgtaacgcatcgcggccgctgagtcgccgtcaaccgaaccgaagttgccgtgtccgtcaacaagcatgtagcggtagttaaaatcctgcgccattctgaccattgattcgtaaaccgctgagtcaccgtgcgggtggtacttaccgataacttcaccgacgatacgggcagattttttatatggtttgtcactggtcatgcctaaatcattcattgcgtacaaaatccgtctgtgaaccggcttcagaccgtcacgcacatccggaagcgcccgggatacgataacgctcattgcatagtccaggaaggatgtccgcatttcctgactgatattgacttcacgtacttgtggtgtgttttgttcactcattaaaaaaacctccctgaagtatcacatgaaataatgtgggagtagattgtccattatgatcttcaatacgatttcactattctccattatatcaataaacttgtgtttatacacattaatttagtagaatatacgggttttgcgggttttcagaggctttagaagccgctttgagaaaaaagccttatttcttaacgaaaataaggctttcttggttagatatcaagatttttcacgtatctggcgtttgcttctatgaagtttctccgcggttctactttgtcacccatcagcatttcaaaagtctcgtcagcgtccattgcatcttcaagattgacttgcagaagcgttctggtcgcagggtccattgtcgtttcccaaagctgagtcgcgttcatttctccaagacctttataacgctggaggccgggcttaggtgattgcggaagttcttttaacagctcatcaagctgcttatcattataagcgtattccacccgttttccctgctgcactttataaagcggcggctgggcaatgtagacatagccgttttcgatgatttcccgcatgtatctgtagaagaacgttaataaaagcgttctgatgtgggcgccgtcaacatcggcatccgtcatgatgaccactttatgataacgcgctttttcaagattaaaatcttctccgattcctgttccgagggccgtgatcattgatctgacctcattgtttgagagaatcttatcaagtctggctttctcaacgttcagaatcttaccgcgcagcggcagaatggcttggaaatgacggtcccgtccctgtttcgctgatccgcccgcagagtcaccctctacgatatacagctcggaaatgctcggatctttagaagaacagtccgccagtttgcccggcagattggaaatctcaagcgcacttttgcggcgggtcaattcccgcgcttttttcgctgccatccgcgctcttgcggccattaaacctttttcaacgattttgcgggctgagtccggattttcaagaaggaatgtttccagcgcagaagaaaacagcgtatcagtgatcgttctcgcttcggagttgccgagcttcgttttcgtctgcccttcgaattgcggatcagggtgcttaattgaaataatggcagtcagcccttctctcacatcatccccgcttaaattcggatcattttctttgaaaatcccttttcttcttgcatagtcgtttatgacacgggtcagaccggttttaaatccggcttcgtgcgtgccgccttcgtatgtgttgatattatttgtgaaagaataaatattgcttgtatagctgtcgttgtattgcagtgcaacttcaaccgttatgccgtctttctcgccttcgatataaatcggctcttcatgaacgacttctttggaacggtttaagtactcaacatagcttttgattccgccttcgtagtggtactcgtttttccgttcttgtccttcacgtttgtcttcaatcgtgatgtttacgccttttgtcaggaaggccaattcccggacacggtttgaaagcaggtcatagtcgtattcggttgtttctttgaaaatttccggatccggaacgaagtgcgtaatcgttccggtcttatcagtatcaccgatcacttcaagatcggccacaggtacaccgcgctcgtacgcctgatagtggatttttccgtcacgatgaaccgtaacttcaagaatagtcgacagggcgtttacgactgacgcccctacaccgtgaagaccgccggatactttatatccgcttccgtcaaatttaccgccggcgtggagaacggtcatgatgacttcaaccgcagggcggcccatcttctcctggataccgaccggaatcccgcgcccgttgtccttaacggtaatgctgttatctttttcaatctcgatgttaatatctgtacaataaccggccagggcttcgtcaatactgttgtcgacgatttcccacaccaagtggtgaaggcctttgctgttagttgatccgatgtacatccccggtctctttcgaacagcttccaaaccttctaatacctgtatctgattctcatcataactattttgctgctgttccatagccatgcacattcacctacacttttcttaaacgatatattcattgtaaagatccgctaagaatctatttctaacataaattgcgcacgtttcttcagtgtgccggaagataagggagagtaatatatattctcagtcgtgactacgatagactttggcgtgccgtttacggacggcactactttttctttctgtctgtccagaaattcttcaacgatcggcgatacattgaccttgcagtcaaaaatgccgacgatatcgcgtgttgaaacgacaaagtcgtcacctaaatgaatatacaatcgctcacctcatttcttcacttcactaacgtaccgttttccacacggaacattcctgcttgatgtaaggtatcgtggtcaatgccatccacgcttgtcgtggtgacaaatgtctgcacacggccttggatcgtatgaagcaaatgggactgtcggtaatcatccagctcgcttagtacatcatccaaaagtaaaatggggtattctccgatttcttcatgaatcaaatctatttcggccagcttcaaagacaaagccgtcgtacgctgctgtccctgtgaaccgtacgtctgcacatcgcgtccgttcacataaaaaaggacatcatcccgatgcggtccgaataatgtgacgcctcgttctatttctttttcttttaatttcgaaaaagactcctggtagctgttacctattttcgacaaatctttgggatctgatacatcaagcgccgtgtgatacttaagcgtcagttcttcaagtccccgggaaatgccggaatggatcggctgcgcccatttttcaagctgcgccgtaaactgcagacgtttggcgacaacttttgcggctgcttcaatcagctgatcagtgagaacgtcaagcatagtccggtcagtctgtttccggctttgcagctgtttcagaaaatgattccgctgtgaaaggattttttgataaagagataaatcatacagataaacggcagaaacctgcccgatctccatatcgagaaatctcctcctcacctgagggcttcctttgacgagatttaaatcctcaggggcaaacataatggtgttcagcgctccgacatactgactgagtttttgctgctctatatgattgaccttgccctttttaccttttttggagatgacaagctgcatcgggatgtccccgttacgcttcatcactcttccttctattttagcatagtcttcgtcccaccgtataagttctttgtcatttgaggtgcggtgtgactttgccatcgaaaggacatagatggcttccatcagattggttttgccttgggcattttccccgatgatcacattcaccttgttttcgaattgaagctcagcgcgctcataattacggtaggatgttaattctaaattttggatatacaaccgctgtcacccgctttaattgacgacttgaaatgaaccaaatccttcaatcgcgaccacgtctccaacgtaaagctttctgccgcggcgattgtcaggttcattgttgacagtcacctcatgctcgctcagaaaccacttcgccatgccgccggactgaatcacatcggctaattttaaaaactggccaagcgtaatcatttctgtatcaatcgaaatcggatttgccatattatcgacctctttcaaatatcactaatatctaattgtactaaaaaatcctgaaataaggaaagggaaaacttgagggagcggctgatgaatagaaaagctgccgaactaagccggcagcacattctgtttgattaatacgttctgaccggaaggatgagctgaacgatggtttcatcattcggcgtacggataagaaacggtctcatcgctcccgtaaagctgatacggatgtccgctccttcaagtactttcagtgcgtccatcatatattttggactgaatgaaatatttaattcctcgccgtcaatctggtcagccagcacagcttcgaccactttcccgatttccggagaatttgatgaaatctccagcgaatccgccggtttggcagaaagctttacaacgttgtttcggccttctctcgccaataaagaagcacggtctatcgcctgtaaaaattccttcgtgttcacgacgatttccgttttgctttcctgcggaattaagctggtcgtgtccgggtagtttccgtcaagcaatcttgagaagaacaatacgtttttcgctttgaacagaacttgagtttctgtaatgacgatatcaaccagttcttggttgtcatcaagaattttgctcagctcggttaagcttttcccgggaatgaccacgttataagagctgtcttccggaatatcaagcttcgcctttcttaaagcgagtcggtggctatccgtggcagtgcataataattcaccgttttcgactttccagtttacacctgtcaagatagggcgtgtttccgaggcggacacagcgaacacggtttggcggatcaggttttttaaaagatccgtcggaatctgaatggcatgatgctcttcgatttgcggtagatgcggatattcatctgcatcaaggccgtttaaattaaattcggcttttccggaacggataatcgttaaatattgattttgaacttcgatttcaacagtcgccatcggcagttttttaacgatttcactgaagaaacgcgcttgcagcacgatacttcccggctgatcgatcgtcacgatttctttatcaccatcttctttcggaatgaatgactcgattgaaatatcagagtcacttcctgtgaaagatacaccttcatctgaggcgacgatcttaataccagtgagaatgggaattgtggttctggatgaaacggcttttagaacgtcttgtacactttcgactaaacgatctttttgaatcgtaaatttcatgtttatcctcctaacggataatataattaatatattttaaaaatagcagtagtaatagtagggcctgtggatttgtggataagttgtgaaaaagacaggaaacacagcctatccacatgtggacagactgtgtatggctatgaaaaagttattcacactttccccgattcatccgaggacactattatttaagaagttcttttatttctttcacctgctgctgaagctgctcgtcatcaatcagcagttttgaaatcttttcatgggcgtgaatgacggttgtatggtctctgccgccaaattcttccccgattttaggcaaagaagaatccgtcatttctcttgaaagatacatcgcgatttgtcttgggaacgccacggatttcgtacgctttttcgctttgaaatcttcaagcttaatgttgaactgctgtccgacaatccgctgaatctcttttatcgtaatgaccttcggcttagaagacggaataatatctttcaatgcttctgcagccaggtctgcgttaatgtctttattgattaaggatgaataggcaacaacccggattaatgccccttccagttcgcggatgttgctgtcaatctgattcgcgatgtaaagcatgacctcgttcggaatatcaaggccttccgcctttgctttttttctcaggatggcaatccgcgtttccagatccggcggtgtgatatccgtaatcaatccccattcgaaccgcgaacgcaggcggtcttcaagggtcgggatctctttcggcggtctgtcgctggaaatcacgatttgtttgctttcttcatgaagcgtgttgaatgtatggaaaaactcttcctgtgtttgttcttttccggctaaaaattgaatatcatctatcaaaagtacatcaacgttccggtagcggttgcggaaatcaacggctttattatcgcggattgagttgatgaattcatttgtgaatttttcagaagacaggtacaccactttggctgaaggattatgatcaatgacataatggccgatcgcgtgcattaagtgggtttttcctaagccgactcccccgtatataaataaagggttgtacgctttagcgggtgcttccgccacagccagtgatgctgcatgggcgaatcggtttcccgatccgatgacgaatgtgtcgaatgtatatttcgggttgagcatgctttggggaaaatcagacggttcctcttttgccgcttttttcacttgcggtttcggtaaaaagttttcttcgtcctgattttgaggaatgacaaatttgacgctcaattcttccccggttaattcgtatatggtatctgcaatgagatgtaagtacctggactccagccagtctctggcaaattcattgggagcggtgatggttaaggtatccccttgcagcgaatgggctttcgtcgacttcatccaagtttcgaaactcggtttgcttagctttttctcaatttgagctagagcttgattccaaagatctaatatattctccattatccggcacagccctccttttctttaaaaatcagcgccctttccctgttatagaacacaaaaaaagagcatatggctctgaccattcgtacacacgaaatgttgaaaacatatagtatagtagaaaaacagcttttcgacaaattccacaagttgtggacaacaatctacacaagctgtgtgaaaacaatccacaacttatccacagtttgtggataaagagaatgggctggataagtaattaagagttaaaacacaaatataatatcaaattaagcgaggacttgcaatggttctcgtaatcttatccacaaacctgacaacttgttgaaaaatctttgtccacaggggttagcaatgtgaaaatgttgtcgataacgactgtggatattaaaaaaaggcaaaaaaattatccacatgtcgttttttcgggggagcgcggcttttttttttgcgttaaaaaaaggaatatgaaaaataaggtttctaaactggttaaggtatgttatcctattatggttgtaagaaataaaagcactgctgaagttgacaatgaataggcagcacaaatataataagtaagactgtctttaacagctattcctcgagggaggtgtcataaatgaaaagaacattccaaccgaataaccgtaaacgcagtaaagttcatggcttcagaagccgtatgagttcaaaaaacggtcgtctagtattagcacgccgtcgccgcaaaggcagaaaagtattatcagcttaggccactgaataatgtcagtggtcttttttcacattaagagaaaagtgatgtcatgcgtcgcccggtactggagaaatttcttcagtattccggcggcccgttttttttagatagaaataaaagtttctgcgagtgaatatcggagtgaattaaagtgaagaagcgaaatcggttaaagaaaaatgaagattttcaaaaagtgtttaaacgcggaacgtctatggcaaaccgccagttcgtgctgtatacgcttgatcagccgaaacaggaagagctccgggtagggctttctgtcagtaaaaaaatcggcaatgccgtcgtgcgcaatcgggtgaagcggttaatcagacaggctgttcaggaggaaaaagagctgctcaagccgaaagattttattattatcgcaagaaaacccgccggcgacctcagttttgaagaaacgaaaaagagtctgcagcacttattcagaaaaacctcattatataagaaatcttcgtcaaaatagctcatattttgttttcttcacgtttttaaaagcgcttccttttatttggcgaaaaatgaacgccatttgaaactgaaagatgctaaaatacatacaaggttcataaagattggtataggaggaaacgttcttgaaaaggagaatatggttactactgagtatggtcggtatgctcgtgctgctggccgggtgctcgagtgtgaaagagccgattacggcgaatagtccgcatttctgggacaaatatgttgtgtatccattgtcagaagtcattacgtacgtagcgaaactgacgggcgataactatggtttatcgatcatcatcgttacgattttaattcgtctgctgattctgccgctgatgatcaagcagcttcgaagctcaaaagcaatgcaggcgctgcagcctgaaatgcagaagctcagagaaaaatacagctctaaagatcaaaaaacgcagcagaagcttcagcaggaaacgatggccctgttttcaaagcacggggtaaacccgctggcgggatgtttcccgatcctgattcaaatgccgattttgatcggattctaccacgccattatgcgtacgcaagccatttcacagcacagctttttatggtttgacctaggagagaaggatccttactatattcttcctatcgttgccggtgtggccacttttgtccagcagaagctgatgatggccggaaatccgactcagaatcctcaaatggcaatgatggtatggattatgccgattatgatcatcgtatttgcgatcaacttcccgagcgcgctttctctgtattgggtagtcggaaacctgtttatgattgctcagacattccttattaaaggacctgacattaaacacgatccggaaacgcagaaagcgggaggaaagaaaaagtgaagaaggtgactgctgcgggacggaatgtcgaagaagcagttcaatcaggccttcaggaacttcaactgacgaaagatcaagtagaaataacggtggtgcaagaagaatataaagggtttttgggtattttcgggaaaaagaatgcgatcgtagaactggaagagaaaagaaatcctgttcaggaagcgaaagcgtatttggaagaaatcatccattccattgccggaccttctgagattgttacggaagaaaacaagaaaacagtctgttttcacattaaaggtgaaaaagcggcgctgcttattggcaaaagaggacaaacactcaatgccctggaaacattgacgcagcttgttttgaaccgcggctcaggccagtatcgccaagccgttgtcgacgctgagaattatcggcggaaaagaagagaaattctggatcagctggcaaacaggctggccaagcaagtgtcgaaaacgaaaaaagatgtgcatttagaaccgatgccgtcaggtgaaagaaaaatcatccatgatgctctgtcaaagcatccaaatatcaaaactttttctaccggtgaaggccggtaccgccatctcgttatttcccataaagatagcagaaaaccgaagtccgggtaaaatcggaacttcggtttttttattggtaaaaatggctctattcctaagcagaatcgcattttttgcgtttaagttttttctttttcggtctatgctgttgataaaaaaggttttagggaaataaaattaattgttattcacatgtggataagttaaagtaataagggatgaatttctgcctttgtggataacgtatcttccacttcaaaccaaactatgttatcttttaattttggcgtaaataaaattttttatatagatgaaaacagagataaagagaggtgaacagcatggatacaattgcagcgatttcaactccgatgggtgaaggcgcgatcgcgatcgttcggctgagcggcccggaagccgtagagatcgccgacaaaatgtacaagggtccgaaaggcaaaacgctcagttcggcagaatcgcataccattcattacgggcatatcgcggacagcacgacgggacggattattgaggaagtcatggtgtctgttttaagagcgcccagaacattcacaagggaagatgtcattgaaatcaactgtcacgggggtattgtgacggttaatcaggtgctccagcttgctttaagagaaggggcgagactggcagaacccggtgagtttacgaagcgcgcatttttaaacggacggattgacctatcacaggcggaagcggtgatggatctgatcagggccaaaacggaccgtgccatgaatgtcgccatgaaccagatggaaggacggctttccgcgcttgtccgccgtctgcgtgatgagttgttagaaacacttgcccatgttgaggttaatatagattatccggaatatgatgacgtcgaagaaatgacgcatcagcttttagtggagaaggcaagcggcgtgaagaaagaaatcgaggcgctgctccgtacgtctgagcaggggaaaattttgcgtgagggactgtctactgtgatcatcggccgtccgaacgtcggaaaatcctctctgcttaacagccttgtccatgaaacgaaggcgatcgtaaccgatattccgggaacgacgcgtgatgtgattgaggaatatgtcaacgtacgaggcgtgccgcttcggcttgtcgataccgccggaatccgtgagacagaagacatcgtcgaaagaatcggtgtggaacgatcacggcaggttctgaaggaagcggatctcattttgcttgtgcttaaccacagcgaagtgctttctgaagaagatgtgaagttgtttgaagcggttgagggaatggacgtcattgtcattatgaataagacggaccttgaggctaagattgacgctgagcgcgtcaaggaactggcgaaaggccggcctgtcgtcacgacctcattgctgaaagaagaaggcattcaagatttagaggaagcgattcagtcgctattttatacaggagcgatcgaaagcggagatctcacctatgtcagcaacacccgtcatatctcgattctgcatcaggcaaagcaagcgattgatgatgcgctgaacggaattgaacaggatgttccgattgatatggtccaaattgatttgacaaggtgctgggaactgctgggcgaaatcatcggtgatgccgtccacgaaagcttaattgatcagctcttttcacaattttgtttaggtaaataaaagggaggaaaaaaccatggggtatgaagcaggccaatacgacgtgattgtcatcggcgccgggcatgccggtgttgaggctgccctcgcatccgcgcgccagggagccaaaacgcttgttttgacgattaatcttgatatggttgcgtttatgccatgtaatccgtctgtcggcggccccgcgaaagggattgtcgtccgcgaaattgacgcgctcggcggagaaatggctagaaatatagataaaactcatattcaaatgagaatgctgaatacaggaaaaggtccggccgtacgggcgctgcgtgcgcaggcggataaattccaatatcagcacgaaatgaagcatacgctggaaaaaacaccgaatttgacacttcttcaagggattgccgagcgtttaatcattgaagacggagagtgccgcggtgtcattacgcaaaccggtgctgaatacaaggcaaaaacggtcgtgctgacaaccggaacgtatttaagagggcggatcattctcggtgatttgtcttactcaagcggcccgaataaccagcagccgtctattaaactttctgagcacttagaggagcttggttttgatctcgttcgttttaaaacgggcacgcctcctcgtgtctcaagcgattccattgattacagcaaaacagaaatccagccgggggacccggttccgcgcgctttctcatatgaaacggttgaatacattaccgatcagctgccttgctggctgacttacacgagtcctgagactcatgagatcatcgacagcaacctgcatcgttcgccaatgtattccggtatgattaaaggaacgggaccgagatactgcccttcgattgaagataaagtcgttcggtttaatgataaaccgcgtcatcagattttcctcgagccggaaggcagaaatacgcaggaagtatacgttcaaggtttatccacgagtcttcctgaggacgtgcagcagcggatgctggcgaccattccgggactggaaaaggtgcagatgatgagagccggatacgcgattgagtatgacgcgattgtaccgacgcagctctggcctacactggagacgaaaaaaatccctaacctgtacacagccggtcaaattaacggtacatcaggttatgaggaagcggccgggcaaggaattatggcagggatcaacgcaggccgcaaagcgcttggaaaagaagaagtgatcctcagtcgttccgatgcttatatcggtgtattgattgatgatttggtaacgaaaggaaccaatgaaccgtaccgtctgctgacttcacgggcggaatacagactgctgctccgtcacgacaacgcggatcttcgtctgacggaaatcggccacgatatcggcttaatttctgatgagcgctatgaagcgtttgagaagaaaaaagcggcgatcgaggcggagaaaaaacgtctctggtctgttattatcaagccgtctcctgagaatcaggaatatatccgttcactcggcggaagcgagctgaaagacggagtgcgcggcacagatttaatgaaacgtccggaaatgaactatgaaacagtgacaaaacttgcgcctgcagattctccggttccgcaagatgtggcggaacaagtggaaattcaggtgaaatatgaaggatatatcgaaaaatccttgcagcaagtggaaaagctgaagaaaatggaaaacaaaaaaatccctgatcggattgattatgacgccattaaaggaattgctactgaagcccgtcaaaagctgaaagaagtgcgtcctttatcagttgctcaagcgtcccgtatttccggcgtcaatccggcagacatttcaatcctgctggtatacctggagcagggccgtattgccaaggtagctgaatagaaaggatgacggcatgaatatagaggaatttacatccagtttagcggagaaagggatttccctttctgaccgccagctggagcaattcgagttgtattaccggatgctcgtggaatggaacgaaaaaatgaatctgacatccatcactgagaaaaaggaagtttatctcaagcatttttatgattcgataacggcggcattttatattgattttgaaaaggtcaccactctttgtgatgtcggcgccggcgccggttttccgagcctgcccatcaaaatctgcttcccgcatctgcatgtcaccatcgtcgattcactgaataagcggattacgtttttggaaactctctctgatgctttacaattagagcatacgacatttgtccatgacagagcggagacattcggacagcggaaagacgtccgggaaagcttcgatctcgtgacggcccgtgcggtggcgcgtctgtcggtcctgagtgagctttgtctgccgctggccaagaaaaacggcgtatttgcggcactaaaagcagcagcagctgatgaagagctgaaagcggggcaaaaggcgattaaagtattgggaggagagcttgaacaagttcattcctttacacttcctgttgaagaaagtgaacggaacattatgatcattcgcaagacgaaaagcactccgaaaaaatatccgagaaaaccgggtactccaaataaatcgccaattgaagggtaatttagacagcctgatgtgacaattccatcatattttctgcaaaattgatgaagatacagcaggaaaaaccatgagaaaatagaattataaaaatggcagtttttaaaggtggtgtaggtacatgaagcattcattctctcgtttcttcgggtttggtgagaaggaagaggaaccggagatagctgagcatgatacaaacaaagaagagatactcgaaataccggtacatgctatcgttcccaaccgttttcagccacgcaccattttctcagatgaaaaaatcaaagagttagcaatgactatccatacacacggcatcattcagccgattgttgtcagacatacagaagatgaaggacaatatgagctcattgcgggtgaaaggcgctggagagcggtacagacgcttgaatgggagaagattcccgcaattattaaagatttttctgatacggaaacagcatctgtcgctttgattgaaaacctgcaaagggaagaattgtcctccattgaggaagctcatgcgtacgcaaggctgttagaacttcatgatttaacacaggaagccttggcgcagcgcttaggaaaaggccagtcaacgattgcgaacaagctccgattgttaaagctcccggaacccgtccaggatgcgattatggagaaaaaaattacggaacgtcatgcaagagcactgattccgctcaaacagccggagcttcaggtcacattgcttgcggaaatcattgagaaaagcttaaacgttaagcagacggaagacagagtggtgaaaatgcttgaacagaataagcagaaaccaaagccgagacgcaaagcgttcagcagggatacaagaattgcgatgaatacgattcgtcagtcactgtctatggtagaagacagcggagtcagactgaatactgaagaagaagaattcgaagagtacatccagcttaccattcggatacctaaataaaaactctcctgatcagcaggggagtttttattttaatcaaaaaactattttgagataatgatagatttattgtgcactatacattatatatgtaaaaatttatctttttatgtcgtgaattgtctttttacagtcaaaaaagtcactttatcggagaacttatattagaaagtgtctttttcgtttacatttttttcacttgctgataaacaaattatgaaaaaaataaaacgctttactctttttttgataagatagaaacaagacagtacatgttcatgtgaaggtaggtgacatcgtgggaaaaatcatagcaattacgaaccaaaaaggcggagtcgggaagacgacgacttctgttaatctgggggcttgcttggcttacataggtaaaagggttcttcttgttgatattgatccgcagggcaatgcaacgagcggattagggattgaaaaagccgatgtggatcattgtgtgtacgacattttagtagatgacgcagatgttacagatattattaaaccgacttcagtagagaacttagatgtcattccggccacgatccagcttgcgggagcggaaatcgaattggttccgacgatctcacgggaggtcaggctgaaaagagcattagaatctgtgaaacaaaattacgattacatgattattgattgtcctccgtctctcgggttattaacgattaatgcgcttaccgcttcagattcagtcgttatcccggttcagtgcgaatactacgctcttgaaggattgagtcaattattaaatacagttcggcttgtgcaaaaacatttaaataccgacttaatgatagaaggagtgcttctgacgatgcttgatgccagaacgaacctgggcattcaagtgatagaggaggtaaagaaatactttagagataaagtgtatcaaaccattatccctcgcaatgtccgtttaagtgaggcgccgagtcacggcaagccgatcatactatacgatccgcgttcgagaggtgcggaagtatatttagatttagcaaaggaagtggcagcgaatggctaaaggcgggctcggaaaagggattaacgcgttgtttaaacaggttgatttgtctgaagagacagtggaagagattaaaatcagtgatttacgtcccaatccttatcagccaagaaaacaatttgatgatgagtcattagctgaactgaaggaatccatcattcagcatggcattcttcagcccattatcgtgagaaaatcattgaagggctatgatattgtagccggcgaacgccgttaccgcgccgcaaaacttgccggtaaagaaacagtgccggctatcgtgcgggatttatctgaatcgctgatgcgggaaattgctcttttggaaaaccttcagcgtgaagacttatcaccgcttgaagaagctctggcatatgactcactgctgaagcatttggatttaacccaggaacagctcgctaaacggcttgggaaaagcaggcctcatattgccaaccatttaagactgctgacgctgccggaaagcatccagaacctcattgcagaaggtacgttatccatgggacacggcaggaccttgcttggtttgaaaaataaaaacaagcttgaaccgcttgtgaagaaagtggttgaagaacagctgaacgtccgtcagcttgagcagctgattcagcagttaaacaacaatgttccacgtgaaacaaagaaaaaagaacctgttcaagatgttgtgttaaaagagcgggaatcgtatttgcaaaattatttcggaacaacagtaaatattaagagacaaaagaaaaaagggaagattgagattgagtttttctcaaatgaagatcttgaacgtatcctggaactattgtctgaaagagaagcgtaaaaaccatctttttataaaaagatggttttttatatacgtcttgtcagcttatgaaacggactgagccgttcctgccggccttctgatttatctgtcagctgtaacccctctgctaaaacatttgccatgctcataacaagatgaagcctcgtattctgcaggacaaaatactccataaacccgctgacattgacgattccgttgatatggacgtcaccgatttcaggaaggtctttttgaacacctgctccgggcttcagcggcccatcgccgatttgaaatgaccctacgcttttgacgcggcctaaacaagcatcaaccgctataataaacggatttttatgtagatgttgaatatctttcagcttgtctttcatattgacggcgtgaacaggatctgacagcgtgccgtaaacgtgcaatctgcctaaattcattttttctaactttgttcctacgagcggacctaatgaatctccggtcgaccgatctgtaccgatacacacggtgactaacggtctgccggctgctttacgtaaagatgaagtaaggatcgcttgtatttgattcgcagcagaagaatccgtatgagaaacatattgttttgcccgttcttgagaaaaaagcccgccttttcgattcataaggttcacttccttgtcatgtcatacgagtaatacattgttgtttttggtgttgtatggttgtttacagtatatccagcgctgcctttttttatgcttatgtcatgatcagcatgccggttgtttgaaaagagcgggatagaaaaaagaactcagagcagttattctctaagttcatgaaagaaataagaccatttgatctacgtcgacatattgctgatgatctaatttcagcgctcttttttctgtagagaagaggataaatcctaactgagcgtagagtttttttgcgggttcatttgttgaagtaacagagagatggagctgttctgtggctttcatcttttttgcccggtttatggcttccgtcattaacgcttttcccgcgcctgaccctcggtgtttgggggaaatatacatagaaccgataaccgcaatgtgtcttagtttaaacagcggatgcttggagatcttgaggattcctatcagtctgtcttgttcaaaggcgccaagcaagatgacattgccggcttctagcctggctttgaatttttcggacggccattctttctcctcctcatagctgaccgcgaatgcgtcggggtgatcttttaaagctttgagcctgatatcggagtaaggctgggtatcccttgcggttaaacgcctgatgtacatgatttgagctccttatataaataaaattttctgaatagttaatcgtcgttatcataccatatttgtcccatttgtatgaatgtttgccgctgtcactcaatatagtagcaatatgcggagatgatcagaaattttatgaggtgatgagggtgtggagagccgggatgaagtggatgctgctcatattaagcagccagattggggctgggtatgcaagcgggcaggaaatatggcagtttttcggtgtcgaaagcggactggctattgtattgtttacagtcatgtttacgatttcggcttatattgtgttgaagatcagctaccgggttcaatcaacgcactttttacctgtgcttgagcatttgatggggccggctcttgctaaagtctatgatgtgcttattatgttttatttgttttcaatgacgatggttatgattgccggcggcggtgtgacgctgcaaatgtacaagctgccgttttggatcggtatttttcttctttgcattgtgaccgtcggtttattcttttgggatataaaaggaatattatctctgaatagtattttgataccgattcttgtagcgggactgttatatgcattggtcttttttcagacaacccatcattacacgtggacgatagatttgacccgccagtataattggccggcaagcattaccttcacgtccttaaacatcctttctgttgtcgctgttctttcttcaatcgggaaagatatgaagggactgggagaagcgaaaatcgcaagcgttgcaagcggactgattttcggtatgatttcatttgtttacaatgaaacgcttgtacagcttgcgggcagtcttacacaatatgagattcctcttttcgccgttcttgaaggcgctccttatccgttatttctttgtatggccgccgtgctttttttagccatctatacgacaaccgtgaccggtctgttcgggctgtccagccgaatgcttgcatttgtgaaattgccgagatggacgcttgtatctcttcttttagctgtgatggtgccttttacgacaatcggtttttcagatttgatcgcgattttatatcccatttacgggcttttaagtctttatttgctggtatgtcttcttctttaccctattttagggagatggaaaaaagtataatgctcattttgagtgcggccgttgctcttatcctctctttttttgtacaataaataaagcagtctatggagagaggtgaagggtcttggcggataaagactttggcctgaatgatattgttgaaatgaagaagccgcatccttgcggtgaaaacaggtggaaaatcattcggatgggaatggatattcggatcaaatgcacgggttgttcccacagtgtcatgattccgagaagagattttgagagaaagctgaaaaaagtactcgtcaagcatgaggagcctacatcataagggctggcgctcatgctttttcatatagaggagaggaagaggcctgatgagcaaagtgcatcagtcagcgtgcccgctgaattgctgggacagctgcggctttttggtgacagttgaggatggaaaggtgacgaaagtagacggagacccgaatcatcccattacggaagggaaaatttgcggccgtggcagaatgctggagacgaaaacgaatgcgccggaacggcttcgttttcctttaaaaaagaaagacggcgaatttgtccgcgtttcctgggagcaggcgttagatgaaatcgcggaaaaaatggcggtgattaaggagacgttgggcactgccgcagtgctgcacagtcatgattacgccaataacggtcttttgaaggcgctcgaccagcgttttttcaatggatacggcggtgtgacggagattgcgggcagcatttgctggggttccggcattgaagcgcagcgctgggatttcgggcgttcttacgggcatggaccgcttgatatttatcacagcaagcatgtgatcgtatggggcagaaacgtgtcccggacgaatatgcacctctatcatcatctgcagcaggtgaagaaaaaaggagcgacactgacggtcattgatcctatttttaacccgactgcaaagcttgccgatcggtatatatccgtcaaacccggcatggatggctggcttgcggcgggtgttttaaaaatattatgccaaaccggcagaaccgattctgatttcattcaaaggcattcggtcggttttgaagaaatagaaaagcttctgcagcagacgatttctcttgaggagatcattgagaaaacagaaacgtctttagaagtgattgaatatcttgctgatttatatgctgacggtcccgtctccacttttatgggtcttgggatgcagagatataaaaacgggggcgggacgatacggtggattgacgctttagctgcggcgagcggaaatgtcggtatcaaaggcggcggcgcaaacttcggaaatgtgcaagtcggtgaaagctttgcaaaggcagagctcacccgtcctgatttgaagaaaagttcgagaacgttttcgatgatgactcaagccgaagaggcgctgaatgcagccgatccgccgattgagatgatcatcgtgacgtgcggcaatccgctgacacaggtgccgaatacaaaaaaagtgaaggaagtgtttgaaaaaacaccggtcacagtggccattgattcggtcatgaccgatacggcgaagctctgtgactatgtgctgccgacggccgttgttttcgaagaggaagatatttattattccagcatgtatcatcactatgttcaatatggcaagaagcttgcggaaccgcagggagaggcaaaatcagaccgctggatctggacggagctcgcaaagcgtctcggattcggggagctctttgattacagtacggaagatttcttaaaaatggggctctcttctttggaaaaagaaggaatcacccttgagcaattaaaggaaaaaggacatatgccgcttccggtcaaacaggttccgtggagtgattttcaatttttaaccccgagcggaaaatttgaattcgtctcgtcactggcagaagagaggggatacagcggcctccctcaattggaagtaccggaggagtctgtttatcatgacgccggactggccgggaaatatccgtatacgctgctgtccattcacccgcagcgctccaatcattcacagcacgtgccgtttattgaaaagcttcagcagattcaggtggatctgtcgccggatatcgccgaggagctttcacttcaagacggagatacggcagaggtatacaatgaccgcggccgtctgcgcggcagggtgaaaatcatgaagcaggctcacccgaagacagtaaatatagatgaaggcatgtgggcggcattcggaggctccgtcaacatgctcacaaaggattcaaattccgataatggaatgggaagtacgctttttgactgtctggtagcggttaaaaaaggataatctaaggagagagagggcgggaaatgcttttttctcagcttgtcttttcctatgaacctccttataattgctctaggtttacaatacgtttatacgatgatggtttgatatagaggagatgaaagaatggctttaactgctggaattgtcggtttgccgaatgtcggaaaatcgacgttatttaatgcaattacccaggctggtgccgaatcagccaactacccgttctgtacaattgatccgaacgtgggaatcgtggaagtgccggatgaacgtctgcaaaagctgactgaattggtgaacccgaaaaaaacggtgccgactgcgtttgaattcactgatatcgcggggatcgtaaaaggcgcatctaaaggtgaaggactcggaaataagtttctttctcatatccgtcaggttgatgcgatctgtcacgttgtacgcgcgttcgctgatgacaatattacgcacgtgtcagggaaagtcgatccgattgacgatattgaaacgatcaatcttgaattgattcttgccgacatggagacagtcgaaaaacgcatcacgcgtgtaagcaagcttgctaagcaaaaagacaaagaagcggtttttgaatttgacattctgtctaaattaaaagaagctttcgaacaagaaaagcctgcccgttccgttgaatttacggaagaacagcaaaagcttgtgaagcagcttcatttgcttacgtcaaaacccgtgctttatgtggcaaatgtaagcgaggatgaagtggctgatccttcagataatgaatatgttgcgaaaatccgggagtacgccgcgggtgaaaacgccgaagttatcgtcgtctgcgcgaaaattgagtctgaaattgctgaattggaaggcgaagaaaagcaaatgttccttgaggagctcggcatcgaagagtcaggtcttgatcagctgattaaagcgtcatactctcttctcggccttgcgacatactttacggcgggcgaacaggaagtgcgcgcatggacattcagaaaaggcatgaaagctcctgagtgtgcgggtattatccacactgactttgaacgcggctttatccgcgctgaaacggttgcttatgaagaccttttggcaggcggcggaatgtccggagcgaaagaagccggaaaagtgcgtctggaaggtaaggaatatgtagtccaagacggagatgtcattcatttccgatttaatgtataggacacagttgtaaagggacaagagctttggtataatataaacttgtgagtaatagaattattgctccttgcccattatagggccgcttagaccaaaaggaggtgcaaacagatgaaaaagtacgaagttatgtacattatccgtccgaacattgacgaagagtcaaagaaggcagttatcgagcgtttcaacaacgtattaacttctaacggagcggagatcactggaacaaaagattggggtaaacgtcgtcttgcttacgaaatcaacgatttccgtgacggtttctaccaaatcttaaacgttcagtctgaagctgaagcggttgctgaattcgaccgtttagctaagatcagtgacgatatcattcgccacatcgttgttaaagaagaagaataagcaatttgaaatatataatgttaaaaggtggtctttcatatgcttaaccgagttgtattagtcggaagactgacaaaagacccagagcttcgttatacgccaagcggtgcggctgtcgccacgtttactcttgctgtgaatcgtacattcacgaaccagtccggagaacgtgaagccgatttcattaattgtgtcacttggagaagacaagccgaaaacgttgcaaactttcttaaaaaaggaagccttgccggcgtagacggccgactccagacaagaaattatgaaaaccagcagggacagcgtgtcttcgtgacagaagtccaagctgaaagtgttcaatttcttgagcctaaaaacaacggcggttctggatcaggcggatacaacgaaggaaacagcggcggaggccaatactttggcggaggccaaaatgataatccgttcggcggaaatcagaacaaccagagacgaaatcaagggaacagctttaatgatgatccatttgccaacgacggcaagccgattgacatctcggatgatgatcttccgttctaatagattatcgctatattcataacaagaaaggtgggaaatgacaatggcaggaggacgcagaggcggtcgtgcgaaacgccgtaaggtttgttacttcacttctaacggcattacgcacatcgattacaaagatgtagatcttcttagaaagtttgtttctgagcgtggtaaaatcttacctcgccgtgtaactggaacacacgcgaaataccaacgtaaattgactatcgcgatcaaacgcgcacgtcaaatggctttacttccatacgtaactggcgagtaagccgaaaaaaaagagcaagagcctgcgggctcctgctctttttttatatcagtccccctccatcctgccgaaatgtttcacatgaaacatggaagtgcttctcacacctttgttatcttgctcctctattcaaaaacgcgtacttatgcaatgaatttgtttatactgaaaaacagggggtggctgagatggagacagacagaaatatcctgactgatgaaaagtggagcgcaatcatacgcaatgatgcttcttatgacggagtattttattatgcagtaaaaacgacggggattttctgccggccttcttgtaaatcgagagtcccgaataaagaaaacgtactggtgtttgatacggctgatgcagcgctcgataaacagtttcgtccctgtaaaaggtgccggccgaacggtcttcgtcttcctgatgaagaatggattgctcaaatcattgaatacattgaacgccattatcacgaatccctgactctgagtgtactggccgaaatgtgtcacggcagcccctatcatttacagcggacatttaaaaaaatcaggggaatatccccgattgagtatatacagaaaataagattgtcgaaggcggaacaccttttaaagcatactgatatgacagtcatggagatcgctctgactgtcggaattccaaacacagcgcatttcgcgactctttttaaaaagagaaccgggagttcgcccacagaataccgaaaaaccgtcaaaatgggacagggaggtttaatatgagtaaagagcctatgatctattggacactcttcacacggaatgattggagcctttatacagccgccacatctaaggggctttgctttataggttcaaatcatggaagctttgaagagcttgagcagtgggcaaaaaactcactgccgcaataccgattggcacgtgatgatgaaaagctggcgccttatacggcagagctgtccgagtacattgaacatggcagatcagctttttcagtgccggtagatctttacgggacagaatttcagcttgctgtatggaaagcgcttatggacataccgtacggcgagacatactcctattcggatatagcagaaatgattcagaaaccggcagctgtaagagccgtgggcgcagcgattggaaaaaatccggtattgattacggttccgtgccatcgcgtcatcggaaaaaacgggaaactgaccggattcagaggcggtttagaaatgaaaaagcagctgctggcattagagggcggaaacattgaaacactggaataccggctgagccggacaggagggatcacatgaaactgatttcttggaatgtaaacggcttgcgtgccgtgatgaaaaagatagatatcaatacttacgttcaggaaacggaagccgatattctatgtctgcaagaaacaaaagtacaggatggacaagtatcattacagcctgaaggatatcacgcctattggaactatgcggtgaaaaaaggctactcaggcacggctgttttttcgaaagaaaagccgctgcacgtgttctatggactggggattgacgatcatgatcaagaaggacgggtgatcacgctcgaatttgagcatgtgtttgtcgtcaactgttacacgccgaatgccaaacgcggattagagcgaattgattaccgtcttcaatgggaagccgattttaaggattatctgcagaagcttgaccggaagaagcccgtgatcttatgtggcgatctgaatgtcgcacacagggagatagacttaaaaaatccgaaagctaaccggaagaacgccggtttctcggagcaggagcgggaagcgttcagcgccctgctgaacgcgggatttaccgactcattccgctacttatatcctgatcgggaaggcgcctattcctggtggtcttacaggacgaacgcacgtgagaaaaacatcggctggcggcttgattacgtcattgtttcagacagactgaagccgcggatcagcgaagcggccatttgtgccgatatcatgggttctgaccattgccctgttgaaatgacagtggatttatgatgagatagcagtaagagaaatccactcttgctgcttttttatcaccgaaaatggaggagcacatggcaaatataaaagagattgcgaaactggcgaatgtgtcggtggctaccgtatcacgcgtattaaaccgacacccgtacgtatctgaggagaaaaggcgtcttgtgaatcaagtgatgaaggaactggattatacccctaatcgaaccgccattgatctgattcgcggaaagaccaatacaatcggcgtgattttgccgtacagcgaccatccctgctttgacaaaattgtaaacggtatcacgaaggaagcgtttgcccatgattacgtgacaacccttctccccaccaactatgaccccgctatagagatgacctatttcgaactgctgaaaatgaaaaaagttgacggactgattgtcacgtcccgcgcgaatgaatgggaaaccgccgtgccttacctggaatacggccccattgtcgcttgtgaatatacacagcatcaagagattccctgcgcttataatgacaggcaggcagcatacagagaaagctttttgtatttgaaaaaccgcggacatcaagacgttgcttttacatgtgtacgggaagcggaaaaaagcccgagtacggccgacaaggtaactgcatataaggccgttttcggctctcttgatgaaacccgcattctggtcggatgccatgatatggacgacggaaagcgggcgggtgagcacttctggggtttcgacaaggcgccgacggccatctatgcgcacagtgatgatgtggctgccggcttgtaccagtttgcgaaagaacagaaatgggacgcggagatcatcggcgagggaaatctgagcgtcagccgggcattgaatattccatctctggaacttcatttggaacgggtcggaaaggaagcatttttattgttttttcacgaagaaacggctaaaaaacaaattatgcatcaatttcagcggaaaaagtcttgagctgaaatgggtttcatgctttataaatagattgagaaaaaaagggaggcggacatatgcgaattgaacatgcagcgatatgggtgaaagatttagaacgaatgaaagaattttatgagaaatacttcggcgccaaggccaatgacctttatcataatgagaaaaaagatttcaaatcgtattttctgacatttgactccggatgcaggctggaacttatgaaaaaaggcggcattgatgaagttccgtcacagaatatgaccggatgggcgcatctcgcattttctacaggcagcaaggagcgggtgaatgaattgacggaaacgtttaaaaacgatggatttcaggttgtaagcggcccgcgcgtgacgggtgacggatattatgagagcgtgatagaggatggggaaggcaatttgatagaaatcacggtgtaacagtgcgggggaacccgcactgttttattgattaaatttgctgtgcatttgttttcgggccgaagaggattaacagaacggaacatagaagccagcagccgccaatgaacaaaaagacgctgatgtagccgagcttaacggcaataaatccgacgagcagggaaccgaatatattggaaaaacggccgagcccgtacgccagcccgctccctgccgagcgatattccgtaggatacggctccgatgtatatgcgtatagatttgaggtgaagatccgttccgtgacgttaacgacaaatccaaacacaataatcatgacgggaataaacgtcatgccgtataacagtccggcaatggcagtcagaaaagcacttgcggccagaatccatttcctttggaacgtctcggatatcatggaaccgagcaatgcgccaagcggtgcgccgacagagtgaagcacattataccacagcgttttttccatggtgatgccgttgcttttcagcaggctgggcacccatgaagcaaagccgtaaaagccaaaggtttccagaatccataccgctgacaggatgatggtgatctttaaattcctgccctgaaaaagccctaagtagcctgcgtgcttcactgtatgtacttctgccgcctcttttggcgcgggaagcgggcctttttctttctctgcacgtgcttcaagacggttcataatggcgtttgcctgatcatatgcgccccgattttcgtgccagcgcggcgattcctcaagccggcggataaaaaagaaataaatgagcccggccgccccccatacgaatacgagccgccacccccatgagcctaaagggatgacaaaagcggaaacaacgtttgtgacgggaacgccgatcagtccgatcatggcgcaaagggagatgtattttccccgtacggaggatggaaaaaattccgccaaatagctgttcgttacaatcatggcggccgcgacgccgagtccggtcaagaatcggaaaatcattaaggacggaatgtcccatgccagcgcattcagaaaagatgagatcgaaaagacaaggacaaaacaattcagcgcttttttcctgccgatccgatcggacagccttccgccgatggaggcgcctaaaaacatgcccaggaaggatgcagccgtgatgtcggcaatggtggacagcttcacgccccaatgctcaatcagcgccggagccacgttgctgagcgtaaacagatcagcgagatcaaaaaaatagatgattccgagagcggttaatacttgatagtgcacacgcgaaatggggagacggtctaatcggttcgctacatttgagaatgtctgatgtttcataaaaaaccccctgactttgcaattgtaatcagaaaatactgtaaatttatctgacgaatacattataaaggtctttttttggcaaaaacagagtgtaaataaccagagccaaaggaaacggcatagcgctttcttcttaaaatatataacatttcctatatctgattttgtttatattgtaaaatgttgaaggaaaggaagttgatgcataaatatgaatacgtttgtacggcccgcagagggaagaaatagtgtatcgagatatcttctttctctgttggtcattgtgggtttgttctttttcggaagcatactgaccgtgttttatatgtttctcacgtccgctttcaatccttcactgacgataaattgggatgagggggcattaagtgacccgctggcggatatttatttacagcatatcgtctatttcatagcgatcccgggcatttggatagcggttcgtttcattatgaaacgtcgttttttatccatcatcacaccgaatcagtcgctgaactggaagagaattttctttggattcggcacatatgttgtgctgatgtttgtcgcagggctgattgattttacaattcatccggatcgtttcatgcttcaggaattccatgcttcacgttttctgctgctgttagcggcagccgtcttgttggtgccgattcaaacctctgcggaggaatttctctttcgcggttttctgcttcagttcgccggaaaattgacggcaaacgcggtggttctgacagtcattatcggcggattattcggcgcacttcatttcggaaatccggagatggaaaatggagctctctgggcgggaatcggatatgtcaccatcggcatgatctggacctttatcacgattaaaacgggcagtctggagatgtctcttggcggtcacgctgccaataatatgtttttatttatctttctcacagaagatcattcggtgtacggcggcattccgtcggtatttacaacagcagccggcggctatgaaatatatgattgcatatcgactctggtgatcaatatcatcttcgcgtggctcgcgttccgttttgtgaaaaaagaaaagcagcaggccgcctaggctctgctgctgatttgtaaggtgttcatcgcttcatcaatatccgtcgtcggcctccggcaggcgaaattttcacaaatgtagacagttgtcttcccatcgatcatttgataacccgcggcaaagtcagaaatgccggcaagctcttccggatgttctgcggcgagaatcgtataggcgggagtgaaatgctcctgaagcgcctcaatgagtcgttttctgtccgggtcatctttccttccgaaaacaacaatttctttttggggcattgtatgtgccagtacgctttgcatgaagaaagcgttgctgctcggataggcctctatttcccgtttgaacacggaaaacatcgcttcggctttttcaatcagtgatatgtcacccgtcaggcggccgagacgaagcagctgtacggcagccgcgctgtttccggaaggcacggccccgtcataaacctctttttccctgacaagaagggtctcggcatcattccccgtaaagaagaaacctccgtgccgttcatcccagaacagctccaacatgcttgtacataacgttttcgctttctgcagataagacggattaaaacccgcttcatacagttcaaggtaagcccagatgagaaaagcgtaatcatcgataaaccctttgtttttcacttcgccctcgcgatagcggaccatgacgcgcccgtccggcatgaggtgccgttcgagaaagcggatcgctgtttccgccatgctgagaaagtcaggcttgtgaaatacctttgcggcttttgccagcccggcaatcatgagcgcgttccatgaggtcagcactttgtcatctgtatgcgggtagcttctgttttcacgggcctccagcaattttgttcttgcctcttcaaggcgttcggccagctcatgtccggtgaggccggtctcttcgaggatggcctcacgccgcgtgtaaatgaggtgcgggatgttttcgccttcaaaattgccttgatctgtgatgttatacaccttgcagtaaagcgggccgagttcatcaccgagaaggttcatgatttcttttttggaccatatgtaatatttaccctcacggccttcggtatcagcgtctaaagctgagaaaaagctgccgtcttcatgcatcatttcccgctgaataaacgttacgatctgcatcgcaatctgtttgtagcgctcattacctgtgacttgataggcttccgtataggcggtcaggagaagggcgttgtcatacagcattttctcaaaatgcggcacgagccattcattatcagtcgagtagcgggcgaatccgaacccgatgtggtcaaaaattccgccgttcgccatgccgtcaagtgtcttggttacgccggccaaagcctggttcttgcccgtatagctgtagtagcgaagcagaaacatgagcatatgcggcatcggaaatttcggagcctggccgaacccgccgtacaccgtatcaaacccgccggccagctggcgatacgtgtcatgaaccgcctgttcgccaagcatgccctcagccgggtgaaccttgacttcaagatgagcggcggcgttttcggcgatatcctcaacatgctgccggtcattcgcaaacgtttcggacagatgttcaagcacatcgataaaacccggacggttaaatttgctcgtcttcggaaaatacgtccccgcataaaacggcttttgatctggtgtgacgaacacgttcagcggccacccgccctgccccgtcatcagctggcagactctcatatacacggaatccacatcaggccgctcctcacgatcaaccttgatggctatgaatttatcgtttaacataccggcgatctcttcgtcctcaaaagattcgtgggccattacatgacaccagtgacacgtcgaatagccgatgctgacaagaaccggcttgttttcgcgttttgctttttcgaaggcttcttctccccaagggtgccagttgactggattgtgggcgtgttgaagtaagtacggtgacttctctgtgattaagctgttgggtttgctattgtttggcatgggctcacctgctttctattcatatttgtacgtttaacataccacaatcttctaaaaaaattcagacactcaactttgtgaaccaaacccaagtcattaaaaaggagaactgcttatgactctattttcagggttaaacttcatctatcttattgctttttagataagaagtaaggatttaaaatctttatcattttatttactgttagataagtgaaacacaccccggcgactgtaaccatcccgcctgtcagtgcaataaacgcaggtacctcacctaaccacacccaagaaatgaccaaggttatagcgggtgttaggtaaagtgaaatggctgcttctgaagcaccgacgagtgaagtgacgtatgcaagtgcaaagtaaggcacaaccgttggtaataaacctaagtaaacgatagacaatgtggaattcatagatgcgtgaacaacttctccccataatcccggaagaaacatcagcataggcaatgttgcaccccaaatggtgaatgtcacaaatggaataaaaccatacttttttatatagcgagtttgaaagacaaaataaatactctccgaaaaagctgccagcaggattaacaagatgccgttcactgaatttgtatagtttcctgccccaaatgaaatgatcgacacacccaataaacttatgatagagccaatccatttataaagcccaaaatgttcaccaaaaaacagacgagataacattgcagaaaaaataggtgtcatggtcacgagtaagcttgctacccctgcgctgactgttttttctccgatattcagcaaaatgtgatatagtgcaaaacctaaaaatcctaaagataaaatagcagggatatccttcatgtcaggtaaacgcatatgagtcaaaacagcaaaaaccaccagtgccattgacccaatcaacaagcgaaacaaagcgaggtgttccggtgtgtaactctccaaacccgcgcgaattcccgggaaagctgatgcccacaacccaatcatcagactgtaagatatgccgattcgaactgttttctttcgcatctttctcactcctctttacaaaaaccaaccagttatttaatgtgtttctatattaataaagatttgatgagatgacttcaaccagttaaatagattttgacccaaccactttaaggaggatactttttatgagcgctccagaagaaaaaaagatgaaaaagcttcctaagtacatacaaatcattcaatttataaaagagaaaataggaaatggagaatggccgattggaagtaagattccaagtcagcgcacgcttgccaaacactttgaggtgaacaggagcacagtcattacagctttagaggaattgatggcggatggattaatcgaaggcagaatgggcaaagggacagttgttacgaacaatacatggacacttttggctaagaattccgctcccgattgggatcagtatgtaacctccggaattcagcagccaagccaaaaaatcgttcaagagatcaataaatcagaatcaaattctgatcttatacagctcagtaaaggagaactttcacatgagatttttcctttagctgttatgaaagagatcatgggaaaggtatctcaaaacatagaggcattcgggtatgaggaaccaaaaggctatttgcctttgagagaggcattaagcggctatttaagaacaattgggattcaagcttctccttcttccattctcattgtttcaggcgcactgcaagccttacagctgatctcaatggggcttttacaaaggggatcgaccgtatttctcgatcagccgtcttatctttattcgctgcatgtatttcagtcagccgggatgaagctgactggagttcctatggataatgatggacttttgcctgaacatatccacatggcaaggggggagcgggggagggctatcttatatacaaatccctgttttcataacccgacaggtattttaatgtcagaacggcgacgagaagaaatccttgcggcaagtgagaatgcacagcttcccattattgaagatgacatttatcgtgagttatggatagatgaaattcctccagatcctataaaaacaattgataaaaatgggcatgtgctttacataggcagtttatcgaaaacattaagtccgggcttgaggattgggtggattgtcgggccggaaccagtgattgaacgtttatccgacataaaaatgcaaacagattacggctccagttcgttatcccagagagtagcggcagagtggtttacatccggtgaataccagcagcatctagaacaggtgagaagtcaattaaaggtgagaagacaattggtcatgagtcttttagaaaccaatttgaagaatgtcgctgcatggaatatgccgaagggaggattctttgtctgggtaaaaatattgcctccactatctatgaaattactttatacaaaagctttgacaaaagggatacttcttaatctcggcagcatctatgctcaagaaaaagggaattatattcgcttatcatatgcttatgcatctcttgaagaccttcaaaagggaatttatgaattgggtttgatgattaaagaattggcaatcagataaatatataatgattactttaatagaaagagacatggcaccagtgacaagtcgaatagccgatgctgaaaagaaccggcttgttttcgcgttttgctttttcaaaggcttcttctccccacgggtgccagtttatgggagtgtgggcgtattggagtagatagggggacttctccgtgattaaaatgttgggtttactattgtttggcatggggtcacctgctttcattcgcattttgttgatatagatttactgtaccataatgctgtttagttattctttcttcaattgggatttcttgtttatttcttgactaatacatattgtttatcttccaaatagaatatatgactaaggtgatttatatctttaaactttatatgttttccaaattgtgaattatttaaattgataacgacatccatactttcatctttatcttcatcttcatatccatctaagcaggaatatatttcaattgattcaccttttgacaagtgtttttcaatgaaaagaaaaagtgatttaatagatttacgttggccaggtgtattgttggcgtgtaagtacccttgtaattcatatatataaggatgtgtgaatttgtttctgactgcttcatattcaggatctaaatgaacaatatcaattccgtatgcatcttcctctgtgtcataaacctttacaagtgaattttcgctgttctttcgattttttttaacttgagagcgtttgttgacatcaattccttttatttttagttcagaaatgggcttaagtgtaggattcctgccatactcaccaataggaagttctttgtcagccccaataaaatgatgtaaagtcaatctatttcctcctttattttatacaactaaaatactcaatctgactttggataatgagatcttttttgttgtgtctaactatgatactccgtgtttgcttgcctcatcaaggcttgataatgtttggagactgaagatggatgatgggcctgatttttaggcacaagtttttctttagggaaagaggaaccgaattgaattaatttaattgttatattgtcgacgcatactccatcaatgtccatttagattgtatttttacagctgcagctttttcttcgactatttctaacggtctttcaagttgattatatatgtatccggaaaattaagtataccgtttggccaatttcagcgttatgaagatttcgttgccagaataccaacaattgaagaaaaattgaagcagaatagcattaaatctactctgccggatgctcatgctgctaagatgaaaagggcgggcgcattatggggagaggggaatcttacacacttatctgcagcttcaccgacatactttgtaaaagaaccccaacaacttcttcgcattctgcaagacaacaactattccgctgctttttaacattctcacattaaaggattcaggataaaaaagccgctaacaaagcggcttttcttaagttaagatgcaaaatgttaaaaaaaggttaatctttgccctccttgttttattcaaacatcaatctgtatggctatgtctttcctagaagaacatcggcttggttcttgaagagtaaatcatttaatccaaagcgctatgactcctgcagatgaaatttagattattgggctgtataaccgccgtccattacgactgcctgccctgtaactcctttagctttgtcactggcgaggaatactgcgtaatcagcgatttcttgcacggttaacaaacgtttttgaggaaccaaggggtaaatgacttcttcaaacaccttttctatagaaatgcctctagtctctgcaatatcttgtaactggttttgcaccaatggagtgtcgatatatcccggacacaaggcattgacagtaattccgtattccgctccttctaatgctgatactttagttaaaccgatcaaaccgtgtttagcgctgcaataagctgctttccctgcaaaaccaattaaaccatttatggaagccatattgatgatgcggccaaatttttgttttttcatcaaagggaatactctttttgtcgcactaaaaggagcagtaagcattaatttcagcataaattcaaatttatcagtcgggaagttttctatatccgacacatgctgaatccccgcattgtttaccagaatatccaatcgcccaaaggtttcaagtgtcttagagaaacttttttcaacttgttcttcgtttgttacatcacaaactgcagagaggacttcatatccttgtcccttaagttcctcagctgcatgatgcacggctttttcgttcaaatcggaaattaccacttttgcgccttctttagcgaattcacgtgcaatttctaaaccaattccgctagccgcgcctgtaacaagagcaactttactttctaataatttactcatagtaacccctccaggaaacattttggtctcctaaaagtttacacccggcaattgtataagtaaaatgaataaaaagaatataatgcattcgttaaacttatggaatggagatcatacgatggatatacgccaaatcacttactttcttgaagttgctaaatccaacagttttactaaggcatcagaaaatctgcatttgtcacagcctgccttaagtaagatggttaaaagtttggaagaggaattaaaggttgagctcattgatcgatcagctagacaaatcgctttgacagatgcaggcgaaattgtatttgagcaaggccaaatgattatgaagtcaatagatgacttgtcgacgaacttatacgatcttttacatttaaaaaaaggtaaagtgaaaattggaataccgccgcttatcggtgtcttgttttttcctaaaatcattaaaggatttaaacaattgtatcctgatgtgaacatcaagctgatagaacatgggggaaacaaggtgaaacaggaggttgaagatggagtactggatcttggcgtggttattgaaccagtggacgaagagcagtttgatatcattccattgcttaatgaagaactgatgctcttcgttcattccgctcacccgcttgttcataaagagattgtggaaatgcaagacttgaaaaatgaacctttcatcctgtttagtgaagacttttctcttcacgatcggattattcaagagtgtattagagccggttttcgtccaaatattgtttatgaaagttctcaatgggattttatcagcgaaatgattggagaagaactaggtatctccattttccctcagtctatagtgaaaaagactgatcaaagtttagttaaggcaatctccattgttaatccatccattccttggaaagtggcgattattttaaaaaaaggtaaatacgtttcacacgcagtacgcgaatttatccggtatatttcatttttttgtaagagtaattacgtaaatcaagatcactcatgaaaaaaatgaatggtttttatagtttttatgtattttacggttagagagggctgcgatatattatcttatgtcagaaaataagtacctttcaggaggaaattcaaatggatcaaagccgttaccaacaaggattagacaaattaatggagtacactttaacaagcgatgataaaatctctacgcatttaaagatttctgaagacttgaaagatatcgctccagatgtaagtaagtacattatagaatttgcttacggagatatatattcacggccgggattaaccaatcaacaacgtgcgcttgttaccatttcatcccttgtaacgcaaggaaccgagcctcagcttgaacttcatatcaatacagggcttacatccggattaacaccgactgagattgtagagagtatcacccaattggttccttatacaggcttcccgcgtgtacttaatgctctttcagtggctaagaaggtgtttgcacaacgacatgtagaaagccattgagaaataaagagcttgtatggaatgcgcgatgatttagtaaaaactcatcagtagaatatacacaaaacgacagcctataaggctgttttttaacattaaaatgtctgacctcttttttgtttttcggttgatcatatgtaaaagcgattatattaatcgctttttgatacttagaaacatgctaagctttgacctctttatcagtaagcacttttaaagcatctctcacttttaaggcgaagttgacaggtttatcaatcgcttcgaaatgaatatacatcagtctcggtttgtcaaacagccagtgattgtgaagtgacgttacaatcagatcatgtttccgaaggacgctgataaatggattgatttctttttgcagaattacagtttctccgctgcaaagagcacggccgtcttttgtcattgattcaaatgaaaacatttgcggaatgagcaaaaatgatcttccgggccgtcccagtacaaccggttttatatttgttcgtgatctcattactgtacaaattccattttcaaacgtatgcatggttccgcctagaatatcgttgaattcgtcacaaagaccatgccgttcaatcatttccccgtcagtttttggtaccgcacgcacagttttagtagtcagaactctcagggcctctctcacttttcttgcaaaattgagaggtttatcaattgattcaaaatgcataaacatcagacgcggtttatcaaacagccaatggttatgaacggccgttacgatgataccgaatttgcgcagctcactcattaacgggttcacttcttcttgcagtaaaacagtctcacctaaacataaagctctgccttcccggtccatgctttcaaatgaaaaggcctgaggaataaaaggaaatgcctcggctcttcttccgagtaccaccggatgaatgttgcttcgaaatcttgtcgccgtacatacgccatttacgacactgggcgttgaattgagaattctagcaaattctttgcagagccgtgatggctccatactcgtttcttccacttcatatctcctcctggaatctatttataacgtacttagtattaaagatatgtgaagatagaaaaaatgtaacgcgtcagcagtccatattagagagaatcagcctttcttgtataatttggggttttcatccctttttataatctctttaactgttaatttttaatagattaaaagcttttgatcggactatttaagaaatgaaaacattataaattggtggttttattccagctttgatttttttgtggcggccatttgtgacaagcaccggctgcgcacacataccttatagttgtgactgagtttcagaatatgaaaaaaagcctttatacaaggctttcggtaaataattcatacagccgtttggctgctcattagtgacagctcacagctcttttgtcattaagacatgcgggatgccgtcttccataaattccggtgaatctgtctgatagcccagtttgtgataaaagccttccgcatgtgtttgtccatgcagtttacattgggtgatgcctttttcttttaccatgttttctaattcgcttatgattactttgcccaacccgtatttgcggtaaggcttcaggatgcagattcgttcgagcttgcctgtatggtttacaatgcggacgcgtcctgtgccggcaggctgactttcatgataaaccaagacatgcccgcactgttccccaagcgtatcgaactgatcaaattcatcggattcaggtacttgctgttcctcaatgaatactgcttttctaatctcaagcgctgcttgcaaatcaatttccgttgttattctttttatcctcatgatcaatcaatccttttcacatattagtctggactgcacggcttgcttgtggtcttatagaagtaacgataaaacaattatattgcatatgcaacaaaaacatgaagggtttgaaaagatatgactgatattttgcgggaaatcggcatgatcgcacgggcactggattccatcagcaatattgaatttaaagaattagacttgacaaaagggcagtatctctaccttgtgcgtatatgtgaaaacccgggagtgatacaggaaaaagtggcggaaatgattaaagtcgaccgaacaacagcggcgagggcaatcaaaaaactggaaatacaagggtttgttgaaaagcgtcctgatgatcaaaataaaaaaataaaaaagctgtttccgactgaaaaagggagaaaggtttatccattattgcaaagagaaggagagcattctgcggaggtagccctgtctggctttacatctgaggaaaaagaaaccattttcagccttcttcagcgggtgagaaaaaatatagaacatgattgggaatatgtgaagaaggggaataaaagagattattaatggtcattagttccttttagtgaatgattacgttgtgaatgattaaagtcataaatggatacgttatctgtgaaatctccttcctcggttcctgcttcaactagccgataggcttatttttaacgaaaagtatcaattatggtatatttaaataagaaaaaataattgaagcggggaatgatatgagtacaatcgaaaaacaaagacgtaagaaaatcagagcgaaatcaatcgtacgggccatcatggtcatcatcggcggaattattgccgcgtatggactggaaaccgtattgattccgaatagtgtatctgacggcggtgtaaccggactcagcattgtctgttcacagctgtttcatttgcctcttgggatcttaattgcggtgatcaatataccgtttgtctggttgggatataagcaaatcgggaaaggttttgcgtttctatccattatcggcattatctcacttgccgcaggcacgagttttttccatcacactcctgctatcatcgagggagacaccctgttaatcaccgttgtcggagggattattatcggcttgggaatgggcttggcattgcgcaacggcggcgcattagacggaattgatatgctggctgtgcttctgtcacggaaattgccgtttggcacgagcgacctcattttatttttaaacatgtttgtgtttatttttgtttcttttgtattcggcctgcaaggcgcattgctttccgtcattgcttactacattgcatctaaggtgattcatgtggttgaggaaggcttaagcggttctaaaacatttcagattatcaccaatgagcctgcattaatggtagagaccattcgtgaagaattgggccggagcgctacttataaagaagcatacggcggtttttctcatgaaaaattccaagaaatcacatgtgtcatcaaccgtttggaagaaaccaaactgaaagaaattattaatgacattgataaacaagcctttgtgacggtatatgatgtcgcagaagtaaaaggcagtaatttcagaaaagtccataatcattaagaagcgagctgccgttaatcggcagctttttttaaaaaaggagaaaaaacttgcaaaattagaatggcagctgtatattattgatatgtcaaacgttgactagtcaattaattgcgcaaaagaaagtggggatgggttttgacagcatgttgttcagaggaaggcgagattttatatcagctccaatcactgcataaagtgatcggcacgaagtttgaagcgtgcaccggaatcagccaatcccgccttgagcttctcgccgtgcttttttacgtcgatgagatcagccaaagcgatcttcagaaaaaggtgaatattgatggcgcagccgtgacaagacacttgaaacagcttgaagccaaagaaatggtcacaagaaggcggaagcccgaggacaaccgaattatacttgtccggcttactgaacaggggcgggagagaattgaggcttccaaaaaggagaaggagcgtttcataaaggaaatgcttgccggtgtcagcgaggaagaacgcagtatgttaaaaaacgtattgtcacagatgcagaataatatagaaaatatgaaagcataggagtgttttacacatgaaaacagaactgaaaacaaacgactttatggacattatgaaaggccgccgttccattcggaattacgatccggctgttaaaatcagcaaagaagaaatgactcaaatcctggaagaagcaacgacagcgccgtcttcagtcaatgcgcagccgtggcgttttctcgtcattgacagccctgaaggaaaagaaaaactcgcgccgcttgccagctttaaccaaacacaagtcagcacatcatctgcggtgatcgcggttttcgcagatatgaacagtgatgactatttagaagaaatttattcaaaagcggtcgaactgggctacatgccgcaggaagtaaaagacagacaaatcgctgcgttgacggcgcattttgaaaaacttccggagcaggtgaaccgtgaaacgattctgattgacggaggactcgtttccatgcagctgatgcttacggcacgcgcgcacggctatgacacaaacccgatcggcggctacgataaagaaaagattgccgaagttttcggaatggataaagagcgttatgtaccggtcatgctgttatcaatcggaaaagcggcagacgaaggatatgcttcctaccgtcttcctatcgaaacaatcgcacaatggaaataaggttgaagtgaagctgagaggagagagacagtggacatgattgcggctgttttcgtcggaattgtagctttagaacatatatttatcatgatacttgaaatgttttttatcaattcgaaggcagccaagcggtccttcaatttgccgaagcatttagaaggtgatcggaatgtagcggtcatgtttgcaaatcaaggtctgtataatggatttctggctgccggcctcatttgggggctgatcctcggagctgatccgattggccatatgattcaaatgtttttcgtcatctgcgtggtcatcgcggccattttcggaggctttacttcaaacaaatcaattatcgtaaaacaaggacttccggctgttttagcgcttatttttcttttattggcgtaggcagaacggagtgagggcttccggaatgggagccctctttttttattctgtgttgaaaattattcctgatatgcatcactatagatcgggtgacgtatggattggcatcagattcattattttcagacagtggcgcaatattgcagtcgcttggaatgagtatgattccggatgtaatcagctcgtttcaacacatatatcttcatgtcaattttcagttgacccaagcgtcaaatcagctgccgctccgactccatgtcaatctgttttttaaaaaaagctgatcggcaaatatggtatgatttacataatcagggagtgaggttgcagaggatgaatatgaagagggcgtattatgctattttatacagccagaccgctatcaacttggggttctcactttatacgatggctgtcatcttgtttttgtttacaaaaaccggttcgacggcgatggcctctcttatgacgttcgtcagcattgtatgtcgcgtattgggcagcgccgttttgccgctggtcaccggccggttcacgcttcgttctttgttaatcggttctcaattgatacagatcacactgttagtctgtttgttttttgtcatccaaaccggttcatccgcattcttttttctgctgttttgtctgatcggaggcatttctttttgcaacggatggtttgctccgataaaaagcgcgctgatcggggaaatcattcctcctgatcgaagggcgaaagcgaacggtttattatctgcggcggatcagaccgttcagtttgcggggtggtctctgggcggcgtcatcatagcgttcttgggagaaagcgatacaatgatcatcactgtcatgttattggtttcttcggttttgggcatcattctgtttcttcaagtacggatgtgtgcgccggcaacagtcaaggaacgttccctttttgcagatgcggcaagcggctgggtgtatttatttcagcaaaaacagctcagggttctcattgtgatggatgtgatcgaatcgtgggcaggcatgatatggatcgggtctgtgtccttgacttatgtgcatgacgtccttcataaaggagaggcttggtgggggtatgtcaacggagtctattatgcagggacgatgatcggcggactgatcatctataagttatccggtaagtttcagcatcatctcattccgcttatgctgacgggagcgttggcatatggaatgttcacgtttatttatgggttgatcacaagcgccgttacggccctttttctggtgctgtgtatggggccggcttgtgtattacgagatctcacgcaggaaacattactgcaaaacatcacgaccgaaaagacacgggtcaatatattagcggcgagatcagctttagttcagttcatttttatgttttccattatcggaacgggggtcatctcggatgtattcggcgtgcggtttatttatattggcgcaggcctcctcttattaatttcggcttttttcggattttctcagctgcgaatgaagaagttggtacaaagccgcatgtagtgtagtataatcgggaacgtacgttctatatcgagagaggagagggtaatgtgggacatctggcactgcaattgtatgattatcatctttgggcaaatcagcaaatattcacccggcttaaagagcttccgggggatgtgtaccgtaaggagattcaaagtgtctttccgtcgatagccggtgtattgactcatgtgtatctgtcggataaggggtggtttgatgtgttctctggagagcgtctggaggatacgctgaaatcagctgaacagcaaaaagaggacatcttgtctaaagagatagaagagctggaagaaatgttctcggaattatcagatcggtatcaattatttttgcaaaaggaagaaaatatcagtcttccccttgaaatagagcatccgtcaggtgacatcatgaaaaccgcagcggccgatatgatcctccatgttgtgaaccacggaacgtatcatcgcgggaatataacagccatgctcagacagatggggtatgcttctgtgccgacggattacggtatgtatttatatataaacaaaaagtaaacaagacagccaacgcggctgtcttgtgatatcagtaaaaaagccaaatcatatgagtgatttggctttttcgtttgctatgccatgttctgcagccgttctaaactgtttttccaattcgcttcaagcgctgtaaaagcagcggcggcatcttgctgttctaatgcgtgaatgatatcagagtgttcattatatgatctgtttaaagcgccgttttcactgaaatagcggatttccattctctgaattttgactttcaggcttacaagcaatttgtgaagttcggcgttgtccgcaagcagaatgatgcgatgatgaaatgcattgtccgcttccaggatggccggtttatcgccgtctttcattgtttgaagaagattttcattcagctgtttcaattcctgaatcacggcatcgtccatacgcgggagggcttgctgcaatgcgagtttttcaagcgtccagacgatggaatacaagttttccgcttcttttaactcaatcggagcgacaagcgtccatctgttcgcttttgttatcaccaagccgtcatcttccagccgcaataaggcttcccgtatcggggtgcggctgattcccaatgtttccgacaaatccttgtcctttaactttgtttccggtttgagcttgcccgttatgatccagtctctgagtgtgcgatacacttcgtcccgcatgatggttcttttcagcacaggttctttgttttgattatccaatggaacacctcatgaatcgtagtatacatatttgcattttaccacagtccgggcgctggttagaaatgaagagggacgtctaagaatgaatcgaaccgagatgcttcaactcaatatgctgaaagtcagcggagccgccttcagaaaagagcgtgattccctgatcttcgtgttttgggaacacttcatttgtcaaaacggtttttccgtcgtctgcaaatacttcaatacttgttttgtccacgagaattttcagatggacgcgccctttgtttccgtcaaatggggctttgctttcggcgtatgcgccggttttatcaggctggtctgtaaacgatctgttcacataggcatagccgtcttctgctgaaataccgacatcaatatgccggctttggtctgcggattctctgagtctgacgcctgcatttttgatatctgaccaagcgatgtccatatcaagctgatatatatcacctttgatcgccaatgtctctgaaccgttcacctgtttgtgttctatgctgtcagttgaagaggttaattggttcaatgcttcaaccggctctgatacaaggctgtatgtgccgccgtcctgctgctgaaggcggatttcacggacgatagaatccgtgccgttaaagccgttttttagtgtcggtgtttcattcggataatcccaattgttcatccatgccagcgcatagcgttttgtcagcggatcttcgctattaccgtcttcaaatgtgacgccgccgtaccagtcaaagccgtaatcgagccattgcggttcttcttgatcggcggtaaattccttcccgtcaaagtttccggtccaatacgcgtacgtattcggtttgcctgcgggtttgccgtttgcgcttacgcccagaacccacttggctgttccgtcatctgcacgcatcatataaaggtcggggcattcgacgaggccgatctgctgagtgataaaaccgcccgtgtatgtccaattttttaaatcgggtgattcataaaaaccgattttttcgccttcggccatggccatcacccatttgtcatcctgttcatcccagatcactttcgggtcccggaaatccttagttcccggatttttcatcacgggctgatcactataggaagtaaacgtttttcctttatccgtgctgtaccataaatattgttcctgggcttttgttttggctgtcggctgcgttgtgacggcgaccagcgcgtttttgccgaagcccgcggtgttgtgtttatcaatgacgacagaaccggaccagatatcgccgttttcgttggtgtatttcggaatagccgtgccttcgtccgtccagtgcaccaagtcctctgatacggcgtgccgccattctgtgccgttgccgtttgggtaatcccgattataaagatagtagtaatgatatttcccctcgaaaaaaatgggcttttgagggtcgtttttccatttgtccggggtcgtaaaatgatacgccgcccggtaatctttcttatgctccgtgtttgtgtcagaggaattgtggcttttgtgcggcagtaagccgacaaacaggaacgcacccaaaaagatcaatattacaatgggccattttcgtgccatgattgaattcaccatcttgtttagaaataaaagaaaatgccaatgaagtatcggcattttctttttgttgttattagttgttaaccgtaagctgtccttgttcaaggatgctgtttttaacaacggatgttttcttgtttttgatgttcaataagaagcttggcgcaaatgttgcctttttatcctcaaagaagcctctgtttgtcatgtagcttgtgatcacgacattgttgcctttggcttgcggcactgcgaagtgagagtaagtgaatgttacatcgttaggatcaagacccatttgcagtacaagaccagttttgttcagcggcttgtaaggacctgttaaagagtttgatacataaccaagcatgtaaatatcgtttgagttaataccgtcgatcgtcatttttgaaccgcgtgaatcagtgaacaggtaccatttgccgttcattttgaaaacattcgcgcgctcgatttcatcagttaccgtgtttgaagtgatcagcggcttcatgacttttttcaatgtgtagtcattgtttaattctacgataccgagggcgccgttcgctaattcagcatcgcgttttttagcactttgctgaagcttctgactttctttacggaagaagtttgtgctgccgccgtagtatgctttgttaaataaagattcttcaccttggtatccgttatctgttcccgtgttggcttcgaatacaaggtatttatggcctttgtcttcaacgtagtgagggtctctcagcgtatggttgtcgccggatgtatagttcccttcatcgataaactgctgaacgttttggtatgttttgccgtcaccgtcaaaaatcgttttatgatcttccactccgttgatcttgagcgtgtcatcagattttgacacatttacctgcgccgttgtcaggctttgtttgccgtaatgtgtaccggaaaagtcagtgtagaataaacggatttttccgtcagatgtaaaggttgcagaaccggaccattcttgtgtctgttctttcaggatttcatcgttggcgtcgaacttatcgctgtctttaaagacacggcccgcgtttttccagctgtcgatcgagttgtcgccgactttttgataaaacatgtagatggatgtgtcatcagcgtctttcgggcttccggcaagagcaaacacgacgtgatagccgttgtattcagctactgttccgtcagcgttttggagcggccagctgtcccacacatccagtccttttgcggactcgatatttttaattgttgattggtcgaattgaggcacttggtatttttcactttgctgctgtttagggatctgcagcatatcatggcgtgtgatgtgagagacgccgtacgtttctttgtaaggtttttgggtattttctttcgcgaaggcttgagtcgctcctcctgccagaagtgcagtcgtaaaagttagaactgtggctcgttttgcaaattttttgatgttcatgttcatttctccttttgtatgtacctttttttgcgatctgccgattcgatcctcctgcattcatggatggcaggtttgttacagaaaaaaagacctaaaatatgtaaggggtgacgccaaagaatacactttgcccttaacacattttaggtcttgcctgctttatcagtaacaatcctgcatgatttacttgtcgacatcattctattagactctgattctattgacaactggtctattttcctcttttggatgatagtaaaatgaaaaaaggccttttaatatatgggtaattgagactaaggggtgctctgggcctaggaaaaaacctctctaaaaaagagaggttattttttcttgatagataataaagcgatggtggctaaaatcagcaaagtacccagccattctgatattccgaagggaacatgcagccagataacagctaaaaaagctgccgacagcggctctgcacaggcgagcaggctggtttcagaggcactcagatatttcaggctttccaagtagcaataaaaagcgatgagcgttccgaaaatgatgataaacacaatcgcggcgtatgccggcaaggaccactcgccttcaaatttccagggcgggcggatcaagctgagggcggccccgccgatcagcatgccccatccgacaataatggccaatccccatttcttcagcagacgatgcggctgaagggtgtaaaacgccagtgcaaacgccgaactgatgccccaaaagacggccaaaccggatatggacaggcttccgacattcccgtgcgtgaccaaaatgaatgtgccggcaaccgccaataagacggccagaagctcttttgctgaaggaattctctttgcgcgaatcgctaaaaagcatgtaatgatcgctggccctaaatactgaagaacggtagcagcggccgcgttgccgtactcaattgccgcgaagtaggtgtattgaacgcctaacattccgaaaatcccgaataaaagaaggggaattctgtcctgtctgtctttccaaacagcccatatccgtcctttttctttgcggtacgcgatgccgagcagaagcgcccctgataccagaaggcgcaccgaagtcagccattctgtattaaaatggcggtgctggaacagatactgggcaaccgtccccgagaccccccataagatagctcctgtcagcacaagccaaatgcctgttgttcgtgaataagaaagagcagcgtgtttttccaggatagacacccccgattctgatgttgcgacattaacttacaataattagaaaatgaacgtcttacatgtgatatattatatattacataatagttttcgtcaaaatgattttcgtagaaagcgcttacaaaacggccgtctgatgaatgagcaataaaaaaacaccccggcgggtttccggggtgttttggttattctgcaatcgcgtctgttaaaacaggaacgacttgtttctttctggatacgacgccttttaaaagagccgtgttgttttctaaagtcacgttgaatgctttttccacttttgacgcttgatcaccgatggcaagcgcaagggaatcgttttccagaatatccgtaatcacgagaaggaacaggtcaaggttcttctcggcaattacttttgaaagagccgcttctaattccggctgccgctttttaacatcttcaatatcaactgtgttgacttgggcgatttcgacttttttgctgccgagcgtgaactctttcgcatcaagagaaatcagttcttccacagtttttttacttaagtcggcgcccgctttcagcatgtttaagccgtactcttccgcatctacgccggcaatttcagcaagctcttttgccgctgcgatatcttgctccgtgcaagtcggagatttaaataacagtgagtcggaaatgattgctgacagcatgaggcccgcaatttctttctcgattttcacgttattttctttgtacattttgtttaagatcgtagccgtacagccgaccggctcagcacggtagtaaagaggttccgctgtttcgaagttggcgatacggtggtggtcgataacttcaagaacctgaacgtcttcgatatccttgatgctttgctggcgttcattgtggtcaacaaggatgacgccgtttacttcgtttgcggctgtttccaccaaacgcgggctttcctgtttgaaataatcaagcgcgtattgtgtttcgccgttgacttgtccaaggcggacgggctcagcattgaagccgagtttattttttagatcagcgtaggcaatggcagagcaaatggtatctgtgtctgggttttgatgtccgaaaataagaattttttccataataactccttgtccttttttgtagtgtaaacaatctttttatagtttaacacgtcttgaggagggtgtaatcttcaaaaccttaaaaattgatgtgaaaaagaagcatttttgttgagaggtggggagggttgcgagtaaaatactgggtaagtcagatgctaatcagcatatagtatcaaaaaaggtactatggaggatgaaaaatgaacatatatccgaataaagaaggttgtccggttgaactgacgctttccgttatcggcggaaagtggaagggtattttgttttatcatatgatcggcggaaaaaagcggtttaatgagtttcggcgcatttgccccagcattacgcagcgtatgctgacgcttcagcttcgcgagcttgaggcggacggcatcgtgcatcgcgaggtatatcagcaggtgcctccaaaggtggagtattctcttaccgaattcggcaggtcgctggaaccgatcgttttgcaaatgaagaaatggggagatgccaaccgggagtttctcgaggcataccgggaaaaaacgtctcctcaagatcagtccgctcaaaaataagaagcagcaaaggattaaattccttgctgcttttttttatttcatcgcgatggcctttctggcgttgcgcacgtcattcttcagcaattcgctcaggttgtaagccggatattgaccgcgttcttccatatactcaaagaccatttggtgccacttgatggccgcgtttaagtgcttgacgaagacgtgtcttaattgaggtgtggccgtctctgtaatggctccggcgtaattgcggacagatgttttggccaggatgagcaggccgccgctgtaaaaggaggaatcagcgcgctcttctgtttcatcttcacgaaaagcgggagcttcagggaagaaaggaagcagttcacgcagattttgttccagcgaatggatggaaaatctgtaaagctgttttaatctggcatcgcttacgtcccgctctgttctttttaatttcacaagtccgtttgcctggaaagcgactaactcatgcagttctaacgtttcatgccatgctaatgttctccgctcagtcatggtgtaagaatctcctttatccttcattttcactttcagcatatgccccggtcccgatgttgttcctgatgttttgaagtttccagaaagggaaactcaatgtaaaggaaatacgaaatagaggtgaaactatatgtgggacatgataaagaacttcttccttttcagcagcggggttttgcaggcgaccactctcttacttatcgttatcgtcttgttatatgtacgaaaaaccaaaaagaaaaacagagatacttctggtttcatggatgatcaggatcactgatacaacgggcattctttcactgggatgtccgtttgtctgttttcatgtttcacatggaacattgaggctgtccgcgctcattttacttgcgatttcgacttatgttaaaatatatacgtgtattttggagagtttatggaaaattcaggtcttgaaagagacattgcggcgtcaaaagagcagtcgtctaagctgctcttttctattcgtatgttcgaatgatacaaggtttgaggtgagtaagtgaaaaatacaagggctctaatagaaggcgccattttgatcagtatttttgcaatcatttcccttttggtcgtgtacctccctttactgggggcaattcttctctttgctttgccgctgccgatcattctttacaccattcggcacggtctgaagcccggggtatggatggggcttgccagccttcctgtcagctttattgtaagttcgtttaccgggcttacaggcgcttttacggcggcctgtacgggaatcgccatgggatattattttaaaaagaaacagcccggctatgcggttgctgccggcgctatggcgtatgtgttgtgcggcgtcgttttttttgtggtcagcatcgtgttccttaacatgaatgtggttgataccaccatgtcccagcttcgggagtcgctgtctgtggctgataccatgtcaaaacagctcggttacggagaccagttcgggaagcagatcaagctgatggaaagtcagctgagcacggttcaatatctttttccgacagtgctcgtattgaccggcatcgttttttctttcctcagttatgctatggcaaggccgcttttacggcgattttcccctgatcttccgaagatgaagccttttagagagctcaaactcccgcaaagcgttgtcattctgtattttattgtgacgatattagggtttctgcctttagaaaaagggcatatgctgtattcggtttcattgaatgggggatttattctcagcttgctgatttgtattcaaggattagcgtttatttttttctattgccgcgaaatggagatgccgaaagccgttcctgtattagcaattgtgctgggggtgctttttccgctcatcttgtccgtgtatctcctcttaggcatcattgacataggctttaacataagaaataaggtgacgcgaaattgagtgtgacttacaggtggggagttgatagaaatgcctagtttttatgaaaaaccgttgtttcggtatcccatctatgcattgattgcattgtcaatcatcataatcctcatcagcatttactttaactggctgataggagccatcggtgttgtgctgctcgccgtgatcttgtttttcatcaagcgtgcggattctctgatcagaaaagaaattgacgattatatctccacgttatcgtatagattgaaaaaagtaggcgaagaggcattaatggaaatgcctatcgggattatgctgtttaatgatcaatattacattgagtgggcgaatccgtttttgtcttcctgttttaatgaaagcacgctcgtcggacgctcgctatatgacacatgcgaggccgtcgtgccgctgatcaagcaggaggtcgattcggaaacgatcaccttgaatgagcggaagtttaaagtagtgattaaaagagatgagcgcctgctttatttctttgatgtgacagaacagattcagattgaaaagcagtacgaaaatgagagaaccgtgctggcatatatcttcttagataactatgatgacgtcacacaggggctggacgaccaaacgagaagcacgatgaacagccaggtcacctcattattaaatgcgtgggcgcaggagtacggtatttttctgaaacggacgtcctcggagcggtttatcgcggtgttaaatgaacacattttaacggagcttgaaaacgcgaaattttcaattttggatgaaatccgagaaaaaacagccgtccacactgtatctttgaccctcagcatcgggatcggcgcatcggtttcttccttgaaggagcttggagatctggcgcagtccagcctcgatttggctctcggccgcggaggcgaccaagtggcgatcaaaatgccgaacggcaaggtgaaattttacggcggcaaaacgaatccgatggagaagcgcacaagggtgcgcgcccgggtgatttctcacgcgctcaaggaaattgtctcagaaagcagcaatgtcattattatggggcacaaatttcctgatatggacgcggtcggagccgcaatcggaatattgaaggtggcgcaggccaacggcaaagaaggctacatcgtcattgatccgaaccagatcggatcaagcgttcagcgcctgattgaagaaattaaaaaatacgaagagctgtggtcgcggttcatcacgccggaagaggcgatggaaatttcaaatgacgacacactgcttgtcgtcgttgatacacataaaccatcccttgtgatggaagagcgtctcgtgaacaaaatcgagcacatcgttgtgattgaccaccaccgcagaggcgaggaatttattaaagacccgctgctcgtttatatggagccatacgcttcatccaccgcagaactcgtgacggagctgcttgaataccagccgaagcggctcaaaatcaatatgattgaagcgacggccctgttagctggtataatagtggatacgaagagcttttcccttcgcacgggctcgcggacgttcgacgccgcttcttatttgagagcgaaaggcgcagatacggttctggtgcagaaagttctcaaagaatccgtcggttcttatatcaagcgggcgaaactgatccagcatacgtctctttataaagaacatatcgcgattgcttctcttcctgagaacgaagaggagtactttgaccaggtgctgattgcgcaggcggctgattccctcttatcgatgagtgaagtggaagcttcatttgcggtagccagacgggatgagcatacggtgtgcatcagtgcgagatcgctgggcgaggtcaatgtgcagattattatggaggcgctggatggcggagggcatttaaccaatgcggcaacccagttatcgggcatttctgtctcagaagcgctcgtccagctgaaggaagccattgatgaatattttgagggaggcgttcagagatgaaggttattttcttacaagatgtaaaaggtaaaggaaaaaaaggcgaaatgaaaaacgtagcagacggttatgcacataactttctcattaaaaaaggcctcgctgtcgaagcaaatgcgacaaacatcagcgcattgaaaggacagaaagaaaaagagaaaaaagaagcgattgccgagcttgaaagagcgaaagatttgaaagaaacgcttgaacagctgactgttgagctgagtgccaaatccggtgaaggcggccgtctattcggatctgtcacaagcaaacaaattgcagaagcgctgcaaaaaacgcataagattaaagtggataaacggaaactggagctccaagacggtatccgcacactgggatatacaaacgtccctgtaaagctgcaccctgaagttcaggctgtgctgaaggttcacgtaaaagaagaagcgtaatacacaatgaaaaacccgccgatccggcgggtttttttcatgtcagcagacggcgcagcgcaagaaattgatgagattgtttcattgccgatcatcaccagagtgcatattatattacatcataacgaaggatgtgtcggtatgaaacgatttttttctgaaacatattttaataatccggagaataaaaaggcgctggagcactatccgctgatcggagacggaaaagacggggaagtctatcgcttaacacacaacaaatgcgtaaagtacttctttgaaaaagggacatgtaagaaggaattggcagctttaaagaccggacaaggttccccggtgattccaagactgtatgaatacggagatcgttatattgtgatggaatatgtccaaggcacctctcttgcccgccatatcaaacaagaaaaatccctgtccgtcaagctgactgctgatattttaaatatgctggatgaattaaagaaaatcggttttaccagatgggatgccgaaatcaggcacattctgatcaatgaatacggcaatcttaaagtcatcgaccataaaagagctttttccgccattacccggtttccagtaaaactattaaaaggactggacaaatacggcttggcggatgagtttttgaacactataaaaaaattaaatccgtcacgttacctggaatggcagccgcacatgtaagtttctgaaaatccgcacatgtaagtttcctttttttagggtcgtcatatgatatttgtaacatttgtttggtggagtgtggaaaaaatggcagaatacattatggttatcggcgctcatcccgatgatgaactattgggatcagcgggcaccataaaacggctgatcaatgaaggatataaagtgatttccgttattacggcattaggaagaaaagaagaagctcatcatattaaacaattaggcgaacgcgcgaatcaagagcttggaattgagaaagtcatctttttggagcacacgaatttagagctggaatgtatccctcttcataagcttgttaaagaattagagcagctcattcgcgtctatcagcctgataaaatctttacacatcattacggcgatatcaatatggaccaccagagaacattccaagcagttttaacagccgccagaccgcttccgaatcaaaagcctatcgaactgcttacgtttgaaacgctatcttcaagcgagtgggagagaaatacggctgataaactcttcaagcccaattacttcgtcaatatcacagacacaatggatgccaaactcgcggcgcttcaccactatgacgtagaaatgagggattaccctcatccccgttcatatgaaggcgtaaaacatttaggaaaagtcagagggatgacggcgggtgtggaatacgctgaagcttttgaagtcgtgcggaggatatggaaatgaacaagacattttccgtcccctatccgtatatgatccagacgcttgaccgctactacggggtcaaaacgcgcccgcaaaaacagaaagccataaagacacagatgaaacatgcagatcaaattccgccggtatacaggaaaaaaaagaagttatccattttgattgccacgttttgggactacccgcacacgggcggtttatctaactatattaaaacgcttagtgaaggcctgaaaaaaagaggtcataaggtggatgtcatatcccctaatctgtttccgtccgcacaggtaaaagaactgcgggcggctgttgttccgaaattaaaagatttctttaaagacagatatggggattataacgatcatattttgaaaaataatcggctgatgtttatatacgagcgaatgcttcagaagattcatttggaaagatatgatgtgttccacgctcaagatttatttacagccaatatgttaggcaggttcaatcaaatctataaaaaacctttatttttcacaccgcatggcatgttcactttcaacagacttaaatttcacatctttaaaaaaggctcggtagaagagatttattataaaaaattagagatgaaagcgattgaatacgcagatcgcctgattattatcagcgatacgttccgcagcccgctcatgaagctcggagccgaacaggaagacatgacaacggtggtcacaggaatcgattacgatgcaaaaacaggcgggaaaagaaaaaccccggtaccgaaaaataagatcatcatctcgtgtattgcaagattaggcccgagaaaaggtcacaaatatttactggacgcactttcgagaattccatctgatgtacttgagcatgttgaagtgctgatcgcgggcgacggagagatgaggagcgccttagaggaacaggctcgaaaactgaatctgtctatggtttcctttttaggaaaaagagatgatgttcccgctattttgaatatgacggacatattcgtactgccgaccattaatgatagtctgcctatttcgattattgaagcgatgttcagcggctcggctatcatcgcgaccgattgcgggggtattccggatctgatccgccataacaaaacggggcttattgtcgagccgggaaatgcaaaggttcttgcccgggctttagcgttttttatcactaacaaatctgcgcggaagatagctgcttcaaacgcaaaggcctacgcggagaaatatttaagcagtgagacgatgataaaaaatatcgaatcgatttatcaaaataccatcaagctcggagggagatcatgaaacatgaacatgcagccgttgtacttgatttcagtgcaaacgggattgggatcattcgcagtctggcccgaagaggaatcgatgtttacgcatttgacacggagggaccttatcgtatcggaaaatcaagattggcagattgcgggatatgtcccagccctttaacacaagaagaagaactgctgacatttctgactgatttcgggaagcgattccaagcaaagccggttctgtacgcaggatctgatgattatgcgggatttatatctaaattccgcgagacattagccggtttttttttatttttgctcccgagccactctctgttagaaacggtcttagataaaagcaaagcatatgaattagcggtcaagcataacatcccctgcccgaaaaccttttttccgaacaaccaggatgagctggaagaggccatcgccaatattgacttcccgtgtattttaaaaccggtggccggccatgaatacagaaaaaaagtaaacaaaaaagcaattgtaatgaaggatgccgcacaattgcgcaaggagttcagctcctatagagaaaatggagaactgctcgtgcaggagatcatccccggagacaaccagtgtttttataaagtcgccactttttatgatgaccaaatgaaattaatgggcttattctctctgcaaaagaaccatcaattccctgcagattttggcgcgggggcccacgtcgtcagcaaacggcttcctgatttgatcgagaagaccctgccgttttttgaagcgattcagctgaagggagtaggcatggcggaatttaaaaaggatccccgggacaatgtttacaagtttatcgaaattaatccgcgcttttggctcagccatagcctgacagaaccggcaggcgttcacttcgtttacatgtactatctgtatttgaccggacaacatgtgaagccccagctcgaacaaaaagacggaatcaactggatttatgaggtgcgttatttcttaacgtttttgaagaaacgaaaaagaggagaaatgacgttccgggatttttggaaagggtgtaaaggaaaaaaagagtacgctctttttgcttggaatgacccgatgccatttatcagaaacacttggtctcatctcaaaaacagctggaaacggaagcggaaggaagatcggcatgtatgaaaaggatcttttgtatggcgcatttcaaaaactgagaattgacgaaaaactgtcgtattcgttcggtgaaagggccgcggtgaatccggatgacatcacgtgcctgaaatcgacggacagaagcgccatttataaactgtctgtaaagaaaaaatcgggaactgttccgctgatattgaaggtatataaatcttcccgtgaaaaaaataaggtcgagattaatatatacgggaaagcccgttctgttttaggggatttgctgccggacatctatcatatagaagaaagtgaccatgaaacgtggatatttatggagtttgtcagccagatcaggggacagcttacatttcacccgaagcatttcaagtatattattccgtctgtcgcagaactgcacagccgcacctttgaaaacaagaatatttctgacggtaaatggcggtcgtggctgccggtatacgaatcggaaaccatgagaaaagggcgtaaaaagcagatcaaaaagacagcggaattattggatagagctcttaaagatgagcgcacaaaagatatcgtgaagcctcattatcggcaaatcacaaacttgcttgagcaggaggagccggattttttccctgaattgatacaaaacggctcagccatcacacacggtgatcttcatatgcagaatatctgcacccacgatgcgtccggagatgaaccgtgggatattcaattcatcgattgggaatccgcaaaatacgcgccggtttggtttgatatgacggtgctggtcgaaattctgcttggcttcagaaaagattggagccggcacgcagaagatattcggacgtattgcgtaaaagtgtatacgaaagaaatgaaaaagcggggcattcattttcagacccctcctatgacgctttataaaatggcttatttgcagagaacacttgagaaagggcttcatacccaattgcggagaatcttcgacaatcggggaggggaactgctgccgtatcatgttgacaaagtgtcaaaatggggacgggaattaggattataagtttgagagagggggagcggatgtgaaagaagagatcggcaagccgaacggtctggtgcctccagccttattgcgcgtcatggatcaattttacgggatcgaacatcaaagtgagccagagatgctgtattcattctgtgcggaaggaaaaagctcccccaaacgaaaaaagccattgcgtattctgtacgcaacctttctccgttacccgaatgtcggagggttggcgagttatatcacgtcaattaagacgggttttgagcgcatcggtcatcaggcggatgtcatctcgccgctccaaatgccgccaactttttttcaggaagatatcccgcgggccgctgacgagatcagagcgttacttgttggcagatacggcgccgcaaacgaaaagtttgtgaagaatctcagctatttacatgtctttcaaagatttttgaaggagaaagacttagaacaatatgacctgtttcacgcgcaggatttatttgcggtatttttgctgggataccttaatcaaacgaatcggcgccctctttttttcacgccgcacggacattttacgaaaagccggatgaagtttcataaaatccaaaagggttcaatagaagaggcatatttcagtgaaatagaaaggcagggtattcgggcttcggataaaatcattacaatcagcgactcctttcacgagcccttgctggagtacggagcgaaggagactcagctgacgactgttcataccggcattcacattcaggatgcccctgagccaaaacgtgctgaaaagctcgtgattgcgtgcgtttcccgtctgaccgagcgaaaaggacatgatgtgcttctggacgccctcgcacacatccggcaccatttatccggagtcgatatatggatcatcggagacggcaacatgagagggtttctggaagaaaagaaacggaaactgggcctctcgaatgtgtttttcctcggaaaacgacgtgatgtgccggcgcttttggctgaatcatctatatttgtcctgccgacattgaatgataatttccctatagcgatcattgaagcgatgttctcaggtcaagccattgtcgcaactgactgcggaggaatccctgagatgatccggcatgaggacacagggcttatctgtcagcccggcaacagccgcgagcttgctgatgctctcgtaatgctgattacggatcagtctctcagggaacggcttggaaaagaagcgcgctcttatgcgggccggcatctgcgtcaggaactgatggtttcaaaaatagaaaggatttatcaatcatttttctgaatgataccggcgccgcatggcaggtgcttcaagagcaaaataaagaggccggcgtttaactatccagcctctttccgagttattttttcatctcatacagagtctgctgactttgtccgcccgggccgcctgtcattccttgccgggctgagcttgtttttttcggtgctgtatgggtcagctgagttttttgtgccgttctttttaatccatgagacaagctttgtgttgcctgaattgtttccggataataagaaatatttcacttttccttcgtcaacaagttttttcagctgtgagactgttttgccaaaattttcttcgtgaaaaaagaggcggaaagccatcgcttccgcctcccgcacatatatatgagagagcagcctttatttgtgatcgttctctttttggacttcagctaatttggcaagcagaatgtgctgaggcatgtgcatgattctctcaagcggcacattcagtgattctgcgagcttttgcgccgtttcggcggaaatttgcagcggtttcatgtgatcactccttccgtttctttattgtactaaaatcagaaatctatcgtaagaggatatgacaaaggaatggaggtttgaaaagcggggctttataacagaatgggggaggttttttatgcaatcgccattgatgttattacagctgaagctggctgattatcagaaaaaagccgcagaactgcggacaattgacgaatttattatactgaaacagacattgcaggacatgatgaaagtattcgccgcctgtgaagaatgggagctgtatcaaaaaacggccgatctcatggcgcagacggtgctccacatccgtttcatcgaataagaaaagccctcgctcgggcgaaggcttttcttaaaaggaccgttcttcttcaatgtttttatgctgatcataaatgacaagcttagacgggctgttctctttagccgtctgctccgctttctcgatcgccgcgtcctttgatgtataaagagccgtcggcgccacattttccaccttcacaaaccatccgtccgcatcaacactgggtgttactgcatatgttttcatccttcttacctcctggtttcgatttatttatttgtttcccagcattctgaatggtgaaacacgcagccgctgtttgacaaatacagggaaagtgatatttttctattctttttcatgagaaatggtaaaatggagtttggatattttttaaggagaggacggtgcttagcatgacagaccttctgaatgatcggctgccgccgcaaaacatagaagctgagcaggccgtgttaggtgctgtttttttacagccgtctgcgttgacactggcttctgaagtgttgattccggatgatttctacagaatgtcacatcaaaaaatttacaatgccatgctcgtgctcggagaccgcggtgaaccggttgatttggtcacggtaacgtcagagcttgcgaataccgatttgttagaagaggtgggaggcatctcttacctgacggatatcgcgaattccgttccgacagcggctaatatagaatattacgcgaaaatcgttgaggaaaaatctattctccgccgtttaatcagaacggcgacctcgattgctcaagacgggtatacgcgcgaggatgaagttgaagatttattaagcgatgcggaaaaaacgattatggaggtcgcgcagcgaaaaaattcgggcgccttccaaaatattaaagacgtgcttgtgcaaacatacgacaacattgagcagcttcacaaccggaaaggcgatattaccgggattccgactggttttatcgagcttgaccggatgacggcggggtttcagcggaatgatttgatcattgtcgcggcccgtccgtctgtggggaaaacggcgttcgccttaaatattgcgcaaaacgtcgccaccaaaacggatgagagcgtcgcgatattcagtcttgagatgggtgccgagcagcttgtcatgcgtatgctctgcgccgaagggaatattaacgcccaaaatctcagaacgggaaatctgacggaagaagattggggcaagctgacgatggcgatgggaagcctgtcaaacagcggtatctttatagatgacacccccggcatccgcgtcagcgaaattcgttcaaaatgccgccggctgaagcaggaaaacggattgggcatgattttaattgactacttgcagctcattcagggaagcggccgttcaagcgacaaccgccagcaagaggtatcggaaatttcacgggcgctaaaagcgctggcgcgggagcttgaagtcccggtcatcgctctgtctcagctctcccggggtgttgagcagcggcaggataaacgtccgatgatgtcagatatccgtgagtcgggaagtattgagcaggatgccgacatcgtcgccttcctgtatcgtgatgattactatgataaagaatccgaaaacaaaaacatcatcgaaatcattatcgccaaacagcgtaacggcccggtgggcaccgtctcactggcttttgtgaaagaatacaataagttcgtaaacctggaaaggcgctttgatgacggcggtgttccggcaggtgcgtaaagcctcaagcaatgtcttgaggcttttttcatccgaaagaatgagagaatgccgtctgttcggcagacgaaataaagaaagcgcttttatataatggcattaagggagggatgatgatgacaattgaatttccgcaatttcaagcggcgcaaatccggattgcccggccgaccggacagctcaaagaaatcatcaggttttatgaagagggcctcgggctgaagagggtcggcagcttttccggacatagaggctacagcggtgtcatgttcggcctgccccatacgcaatatcacttggaattcaccgaagaaaccggcgcgtctcagccggcgcccgttccgcacggcgacagcctgtttgtcttttacatccaggatcagcaggaggtcattcgcatcggcacgaaattaaagcagatgggatatgaggagaaagcacccgaaaacccgtactgggaagaaaaaggcgtgaccatcgaagatcctgacggctggcgggtcgtcctgatgaatacaagcggcatataaatgactgtctgaagaaccctgattacgggttctttttcttgttaaagcatgaaagtttcaggagtaatagatagtaaatgaaagagaaaacgcttttaatcatgtttaaggcgaacaaatatagattgataagattttaatgttcggatttacgattgactttctgtttcggcactgatacacttaatttgtttgaatgagatatcgttttgaaaggttaacggaggtgcacggatatatgtcttcagtagtcgtagtaggtacgcagtggggcgatgaaggaaaaggtaaaattacagacttcctatcagaaaatgcagaagtgatcgcacgttatcaaggcggaaacaatgcaggacataccatcaagtttgatggcgtcacgtacaagcttcatttaatcccatcaggaattttttataaagaaaaagcgtgtgtcatcgggaacggaatggttgttgatccgaaagcgctcataacggagcttgcgtatcttcatgaacgcaatgtgagcacggataacttgagaatcagcaacagagcccacgtcattcttccataccatctgaaactggatgaagtagaggaagaacgcaaaggggccaacaagatcggcacaacgaaaaaaggcatcggacctgcttatatggacaaagcggcgcggatcggcatccggatcgcagacctgctagatcgtgacgtgtttgcagaaaagcttgaacggaaccttgaagagaaaaaccgtctgcttgaaaaaatgtatgaaacggaaggcttcaaaattgaagatattctggatgagtattatgaatacggccagcagattaaaaagtatgtatgcgatacatccgtcgtcttaaatgacgcgctggatgaaggccgccgcgttttatttgaaggcgctcaaggggttatgcttgatattgaccaagggacatacccgtttgtcacttcatccaacccggtcgccggaggggtgacgatcggttcaggcgtaggcccgacaaaaatccagcacgtcgtcggtgtatctaaagcgtacacaacccgtgtcggtgacggtcctttcccgactgagctgaaagatgaaatcggggatcaaatccgtgaagtcggacgcgaatacggcacaacgacaggccgtccgcgccgtgtcggctggtttgacagcgttgttgtccgccacgcccgccgcgtcagcggaatcacagatctttctctgaactcaatcgatgtgctgactggcattgaaacattgaaaatctgtgtcgcttaccgctacaaaggtgaagtgattgaagaattcccggcaagtctgaaagctctcgcagagtgtgaaccggtatacgaagaaatgcctggctggacggaagatatcacaggcgcaaaaacattaagcgatcttcctgaaaatgcgcgccattatctggaacgcgtgtctcagctgacaggtattccgctttctattttctctgtcggtcccgaccgttcacaaacgaacgtcatccgcagtgtataccgcgctaactaagaatttgcagcaaacaagcctccggtcacggaggcttgtttttttatgtaggaaaaaaataatagatttttttcaaaaaagtagttgccactttcgaatgttctatgatattataaatctcgttgttacggaacagcttcaatagagtactgcaagaaagcttttgtctgaatgctctatgatacataatccgacacatcaagagccattagctcagttggtagagcatctgacttttaatcagagggtcgaaggttcgagtccttcatggctcaccactttttatggcccgttggtcaagcggttaagacaccgccctttcacggcggtaacacgggttcgaatcccgtacgggtcattgatttactttagcgttattgctaactccttatttgtcctcggagggccgccacgatacggctctccggacaaattactgtaaggtccggtagttcagttggttagaatgcctgcctgtcacgcaggaggtcgcgggttcgagtcccgtccggaccgccattttactttactttatagtatagaaaagaaacatctggctcggtagctcagttggtagagcaacggactgaaaatccgtgtgtcggcggttcgattccgtcccgagccacttacccaaacgcatctgcaatagtaggtgcgttttttcttttgttataaaaaaaagggagagccggcttttcagccggcccagaagaagacgtcaaacactagacggcgttttttttcgtgaggtttcaaaaaaatattattttttaaaagaaaataaaaaacatgacaaaaggatggcagttcaatacgtttttgcgctgttctctttaatttttttatcttttgacctgaaaccgttataatagacggggaacctttttcacgatccgaattgtgatcatcatgaaacatcaatagatgaaatgaagtcattctggcaggaggaaaatcaagatgatggataagaaaatccttgtagtcgatgatgaaaaaccgattgcagatatattagagtttaatttaagaaaagaaggatatgacgtgcattgtgcgtacgacggaaacgaagccgtggaaatggtggaggagcttcagcctgatttaattcttttagatattatgcttccgaataaagacggagttgaagtgtgccgggaagtccggaaaaaatatgatatgccgattattatgctgacggcaaaagactcggagattgacaaggtcatcgggcttgaaatcggagcggatgactatgtcacgaagcctttcagcacgcgtgagcttctggcccgcgtcaaagcgaacctgcgccgccagcttacggttgcgccggctgaggaagaatcagcttctaatgacattcatatcggttctctcgtcatcttccctgacgcttatgtcgtatcaaaaagagaagaaacgatcgagctgactcatcgtgagtttgaattgcttcattacttagccaaacatatcggacaggtcatgacccgtgagcatctgctgcagactgtgtggggctatgactatttcggtgatgtgagaacggtggatgtaacagtgcgccgccttcgcgagaaaatcgaggataatccgagccatccgaactggatcgtcacaagacggggtgtcggttattacttgagaaaccctgaacaggactaaccggcgatgaataaggttggtttttttcggtcgattcagtttaagatcacgctgatctatgtgcttctcattatcattgccatgcagattatcggcgtgtactttgtgaaacaggtggagaattctcttctcaagtcctatgaattatcgttaaatcagcggattgacaatctatcctattatattgagcaggaatataaaggagataatgacagcaccgtcattaaagatgacgtcaaacggattttgaatgattttacgaaaaacaatgaaatacgggagattacatttgttgataaaagctatgaggtcgtcggttcttcgaggccttatggcgaggaaatagcggggaaacagacgactgacccgatttttaaacggattttctcaacaaaacaggcctattcaaaaaaatattatgatcctaaaagcaaaaacagagtgctgatttcagcaaaacctgtcgtcacagagaatcaggaagttgtcggcgcgatatatgtcgtggccagtatggaagatacctttaaccagatgaaaaccgtcaactcgattcttgcttcaggaacaggcttagcccttgttctgacggctcttctcggtatatttctcgcccgtaccattacccatccgctgtcggatatgcgtaagcaggcgatggaactggcaaaagggaatttctccagaaaggtgcggaaatacgggcatgatgaaatcggtcagctcgcaacgacattcaaccatctgacgagagagcttgaagatgcccaagccatgacggaaggggagagaagaaagctttcttccgttatcgcgtatatgacggacggtgttatcgctacgaatcgcaacggggctattattcttttaaacagccctgcgcttgagcttctgaatgtttcacgtgaaacggctttagagatgccgatcacgtctttattgggcataaaagagaactttacatttgaggatttagtagaacagcaggattcaatgctgctggagatcgaacgtgacgatgagacgactgtactgcgggtgaatttttccgttattcagagagagcacggaaaaatcgacggtttaatcgcggttctttatgatgtcaccgaacaggaaaaactcgatcgggaacgcagagagttcgttgccaacgtgtctcatgagctgcggacaccgctgacgaccatgcgaagctatttagaggcgcttgcagagggcgcgtgggaaaacaaagatatcgctcctcgtttcttaatggtgacccaaaatgagactgagcgcatgatcagattggtgaacgacctgctccagctttctaaattcgacagcaaagattatcagtttaatcgggagtggattcatatgatccgctttatgtcactgattatcgatcgttttgaaatgacgaaagaacagcatgtcgaatttatccgcgagcttccggacagaaatctgtacgtggagattgatcaggataaagtgacgcaggttctcgataatatcatttctaacgcactgaaatactcaccggaaggcggacatgtcactttctcagtcgatgtgaatgagaaagaagagctgctttatatcagcgtaaaagatgaaggtatcggcattccgaaaaaagatgtggaaaaagtctttgaccgtttctacagagtggataaagcgcgcacaagaaaactcggcggcaccgggctcggccttgcgattgcaaaagagatggttcaggctcacggcggagacatttgggccgacagtgtagaaggcaaaggaacgaagattacatttactcttccatataaagaagagcaagaggatgattgggatgaggcgtgaaaatataaaaacagtcatactgtcagtgctggtcgtcattagtcttgttttaacatggggaatttggacattccagcccaatttttcagaaggcacggcctcaaccaaatcgactgtccgggaaaagcataaaattgataaaacgagccaaaaagtgtcgcaaacggtaaaaccccgggatatgtttattcatacaaacggctctcattacaaagtgaatgatgagacgctctttaatgacctgtgggcggatttgccgcaatgggaagtaaaagggatgaaggatatttccgatcaatacgacaagctcggttttaaaaattggctttacggcagaaacggcaactcggcaaagctcgatctgcaattcaatgacaccattccgattgatttcttccaaacgatgtttaaatggtcgaatccgtcaatggaatacagttcctttgaccatattgtcattccgtttaatgagaataagacaaataaaaagatttacatggtctcatacagcaagcagctgattttggaagtgactgtggaatcggcgaattaccgcaatctgatgaatgagctgtacagcaaaaagtcgagtatgccgttataccacctctattcggtcggaaaaagcaaagaatttctcatgccgaatgcgcggtttaatatgaaggaaaaagaatttattactgaaaccattaagacgaacctgtttaagcagacgctttttaatgatccgagcacggtcagagaagacccgaattacaatcggaatgtgctgactgacggaatcagccgtctggaaatcaattcgacacagcggcagattcaattccagcatcggaacctggcacaaagcgcttcttatcaaacaggggagctgattaagaaaagctataaatatttagaggatacgggaagctggacggatcattatcaatttttcaatgtgagtgataaccagcagctgagtttctacatgtttaaagaccaaatgcccgtgatcaacagcacgtctaagcctttcggatccggacctgttttgaccctgcaatgggccaatgacgaggttctcagctacaagcggccgaactatgttctcggaccgaatccgattaaaacaaaagacgtaaaaatgatgaacggcaatgaggttgtgtctctgctggagcagcaggataaatacgacgtgaataaaatcgaccagatcttcctgtcctatcaaatggtctcttcatcaacgaatgatctcgttgagctggaacccgtctggagtatgaaaatcaacgggaagatcgtcccgattacgaaagatctgctggggaaggaggaggacgataatggagtggaataagacaaaaacgatcttcatcattgccttcctcatcctcgatatttttctcggctatcagttttttgaaaaacgctcgagcagtgaatacgaagtgattaaaaattcaaatgtggaaaaagacatggagatggatcatatcactttcggcaacctgtcttctgattccgcgacgggctaccggctgacggcgggccaaaaggtatttaccgctgaagatattgatgctttgaaagatcaaaagcctttaatggagatgccggcggatgatcacaaggttacgacgctgaaaatgaaacttaccgatccggtcggtttatcgaagcaaaaaccgcaggaggatgcggaaacgctcgtcagctctaaaataaccggcggtgaaaaatataaactgtggaaagtcgacaaggataaaaaacagatcattttttaccagatgtatgacggccagtttatttatcaggattttgactcgtccacggatgcgatcggacaggtgattctgcatctgaacgataaaaatgaggtcgtatcttacgagcagaccatgctggagtcattcaagcgaatccagacggagagcctgattcctgagcttgatgcggtcgaattattgtattctcaaaattacttaaaagcgaattgcgccgttaaaagcgttaagttcggctatattgcccaatatccgctgacaagtacgcaggtgctggcgccggtatggagaattacaatcgaagataaatcaaaagggacgaagaaaaagacactgcaaacgtacactgtgaacgcattggaaagtacagtcattgataacaatcaaaataaataatggagtgagacacaatgggcttgcaatttagcgtgcttgcgagcgggagtaccggaaacgcgttttatctggagacagatgagcactcttttctggtagatgccggcctgagcggtaaagcgatggacgggctgatggagagaatcggccgcaagatagacgacgtcgacggcatctttgtcactcacgagcacagcgaccatattaaagggctcggcgtcattgcgagaaagtacggacttcccgtctacgccaatgaaaagacgtggaaagcgatggaaaatcagatcggcaagctggataccggacaaaagtttttgttcccgatggaaagcgtgaaatccttcggcgggcttgatgttgagtcattcggcgtctctcatgacgcggccgagccgatgttttatgttttccactaccaaggcagaaagctcgcgctgatgacggacaccgggtatgtgagcgacagaatgaaaggcattatccgttcggccaatgtgtttgtgtttgaaagcaaccatgatgtcggcatgctgcaaatgggcagatacccatggagcattaagcggcggattttaagcgatgtcggccacgtctcgaatgaagacgcggcgctcgccatgactgatgtcatcggcgacggcacatcgcgcatctatttggcgcatctgagccaagacaacaatatgaaggaactggcgagaatgtccgtgcagcagacattggctgcgaaaggatttgtcgccggggaaacgtttcagttatttgataccgatccgaaaatcccgacgccgctgtgcgccgtgtaatttttccaaatgaatcatgattattaatccgcgatctgacccacactataagcaaatcgagtactcttgaaaggatttgagatagggtggattataatcgcgatgatgaacagtacgcctccgaacagccccgccgcagcaagagagggtactttctatcaagtctgatcggcgtcatcgtcggggccgcgctcatggctttcctgctgccgtactggacaggcggagaccatggggaaagcagcaaaagcaccagccagcgtctcggcagcgaacaggtgaaaacagtcaacgtaaatgtcaatgacgctgtcacgaatatggtcagccgtgtatcagattcggtagtcggcgttctcaatatccaaaagaccgatatttggggagagggcggcgaagcgggaagcgggtccggcgtcatttacaaaaagaacggaaacacttcttatatcgtaaccaatcaccatgtcattgaaggtgcgactgagattgagatcagcctgaaggatggctcacgcgtgcctgctgagctgatcgggagcgaccgtctgatggatctcgccgtgctgaaggtgaagtctgataagatcaaatcggccgcccagttcggcaattccgatcaggtcaaagtcggagaaccggtcattgcgatcggaaatccgctcgggcttgaatttgcgggatcagtgacacaggggatcatttcaggcacggaaagggcggtgcctgttgactcaaacggcgacggacagccggattggaatgcggaagtgctgcagaccgatgccgcgattaaccccggcaacagcggcggcgctttgatggatatatcgggcaaggtggtcggcatcaactcaatgaagatcgctgaatccgccgttgaaggaatcggcctgtccatcccgtcaaagcttgtcattcccgttattcaggatttagaaaaatacggagaagtcagacggcctttcctcggtattgagatgaaatccttaacggatattgcgagctaccattggagccagacgctgaaacttccgaaaggcattaaaaccggggcggtcattatgggtgtcgacgcattttcaccggccggaaaagcgggtttgaaaaagctcgacgtgattactgggttcgacggacataaggtcaatgacgttgtggatctccgtgagcgcctgtatcgcaaaaagatcggcgaccgtgtgaacatcacgttctaccgttcgggaaagaaaaaaacagcggaagtcaaactgacagaagcggatcgattacaaaaataaaaaaacagcccggatatccgggctgttttttattgatttatttgttaatattatactattgtgagtacgggaggtgaaacacatgaaaacggctgatgtgatcatcgtattgaatgaaattgaaggtgaatgtgaaggaagaattattttagaatgcagaatttagaacatgaaacatgtcatatcaaacgtcctttttcagggcgctttttttttatgccttttttcagaagccataaaaaagaactgaacgcgggtcacaacacgttcagttaaaaatgggtatatttagaaaaaggcagacgtgaacttagaactttgtgattgaaacagactggtgctgctgaattgaagcggcagatgaaactgccggcagctttttgttgttatttacagatggctccgttgtgagcgtttactttcaacaattcagcttagattccgttttgtttcagataaaagcgaataatagaaggggaagcgaaaaaaataaacacaggctgatacatctaaggagagactgcatcatggagaagttgaaaggcatcaagctgctgagtgcagacggcgagtctgcactcattgattctttaacgatggggcttcatcacggaacggtcctcggagaagacaatatcgtcgaggtgtacatccgttctttgcgcgaaaagctgaaggacaaagaacacaaggtgattcgcacggttcggggagccgggtacagggtggatctggcatgaagcggctgtacagaaccctgcgattccagctcctgttcaggtcactggcaattttggctttgctgttatgtcttatcggcggcactcagtacatgtttatgacacggacgatgtatgaaaatcaggcgatcagcattcagagttatatcaattcaatggatcaaagcgtatggaggtcaatcaaaacccttgcccgttccgaaacaccggctcatccgaatttgatttaccccggggtgacggttgcttttatcaatcaatcatacaagatgtctgttttatcagaagacccgcacgcgggggccgctccttcttttccgaaaaacgtgtatcaggatgcgctgacagatacaacggcgcttcactatcaggtggctcacaataaggcgggtgaggaaatcatcgtcgtgtttcaggcgatttccgttgacggaaggcaggcgggagttgtgcagatgagcacgctgactcagcctctgaatgattcgcttttccgccagatcagcattttcgcggtgctttcctttgcggctttggtcatcggactgtttgttttcctgccggtgatccggctcacgctcaagccgctgtcccgcattgtgcgtatgatgggtgacattcatgccggcagtctcgataaacggctgccgatcgataggaagcaggccgaaattgagtcattgggcatctctatcaatcagatgctggaacggattgaaatctcttttcaggcggaaaaagaagcgaaggaacgaatccggcagtttgtatcagacgcatcacatgagctgagaacgccgcttacctccattcatggctttatcgaaatattaatgcgcggagcggcggaaaagccggagcagaaagaaaaagcgcttcaaagcatgtacgcggaatccgccagggcgaataagctgatagaggatcttctgtttctcgcgaagattgaccgggtgccgagctttgaaatgaaaaaaggcgcattgggagacgtcattttggaaatggaggctcagctgaagctgctcgcgagaaaccggaagctcgagttctttgtcgatcaaaagatagaagccgtttttgacaaagacaaaatgaagcaggtcattctcaatctcttttacaatgcggtgcagcatacggatgaagacacgggtgtcatcaccgtctccctgcagaaagacggaggaatcatgcttatgattgcggataacggaacgggaatcgctccggagcatgtgcctcatttgtttgaccggttttacagggcggaaacctcccgatcccgtcaatccggcggcgcggggctgggtcttgccattacaaaaaccattatcgacagccataacggaacaattgaagtgaaaagtgagcagggaaaaggctccgtgttcatcatccggctgccgggataaaacctgaaagcaggaagaaatatcacaatttatatataaattctaaattttcaaaaaataacttgtcctttaccaatattgatgataatatctaattattggtaaagggggtgtgtactgatgaagattgaagaacttgatcttgatacagaaacagcaagcttggtgcatcgctgctagtaaagccgtgactcccctcattggggagttattatctttcagggggtatgtcatgatgtcaacggactgtaagcgctggaagtttaaagacagcgtgcaggtgctgacctacacggcgcatattatcattcaatatcgaaaggcgattaagcttacgcatacgagtgagatcaaagaggcggttgaacggctgatcaccggctgtgaaaaacaagagctttctgatcttctgggagaggaagcgggaaaccagtttttcgatgcgttaatgaaattggatgctttaatagagccatggcaaaacggccgtgaaggccgcatcactgaaaagcagctgtaccattttgagaaatacaaccaaaaccccaatctgatccaaaagagattagacggcagcagggcagcaatcgtgggtctggggggcgtcggaacgatcattcttcaaaaccttttggcggcgggcatgcagcattttattctcattgatttcgatgccgtatcagtacataacctgaacagacaattcgtctataataaatcttctgtaggcaaattaaagatctcagaatgcagagattatattgcgggtatcaatccccatgcggacgcagcactttaccataaggaaattacacagccgcaggacctgcgtgtgttagatccgtatgaaattgatatcgtcataaatgccgctgacaaaccccataacatttctgaatgggtttaccggtattgcaaggagcggaatatctcgtttatgaccgggggtgtcggcagcttcagcggccaatgggggcctctgctcacgcctgaatcctatcaatcgggcgtcacctatgaaaaaaacatgccggccggacttctgaactgttaccccgatgaaccgatcaaaggttccttaggagcgacaaacggtattatatcctcgtttatgtctcatgacattatcacataccttgcaggcggaagcccgaaatccctgaatacccgcatcggtctggactttgacggccttcatattacagaaacgaagctttctcaaaaggaaagcgctctatgaagacgatgcatcgtacggtgagaaaaccgggcgaccctctgaaaatagaaatcgacacaagcccgatacgcttgaacccattagatacgcaggattacacaagcaagatgatttgcagcattatgtatgaaagtctgcaggacggctataactgccgaatcatccgcaaagatccacgtacctgtcaggtggacattcacccggactatttaggtgacgccgagggtgtggttcaaacgatcatctatcatctgacgaaagaaaatcaaagcccccatctcggcagtttcctgaacataaaacaggccgttccgtatgtaaaaggcctcgtctcatccgatcagctcggggtgaacgtaacgggcgaaaaacgctttgaagtcaccttggacgagccgtctgatgaaatagaagccgttttgcagagcagctttctgattcctgggaccgccgggggcgatgtgccggaaaacggcccgtaccgattcaagcgtacgtttgagaaggggctggaatttgagcggaatccgcaatataaaatgacgcccgcggatcaccgcacggttcagaccatccaatttattttgaatgatgatctggaaaaaagcatcgggctgtacgaagcgaatcaaacggacgtgacctgccacacccagtttcatcattcaaacatgaggtatcggcagtatgctgattttaaagaaaatcatttgccgatgttatttaccttcaaggtaaaggacggcatgctgagaactttcattcagcattattttgataaacaaaagctggccggggatttggggcatatcatcacaccgactgattcactgatcggtatatgggaaagcgggaggacaccgcagaaagatccgccccttttgacaaaagaagagccgatccgaatcgtttatgccgattattatcccaacggagagatcattgaaaggctggctgatctgtttcggcgggccggagcggacgtatccgtctcccgcgtcagtcatttcaatgattattaccatatggataaaagcgggtttgatattgagctccatttgttcctgccggcttacatgcatgagctgagctatatcaagtatttcatccgcgacatcagcgatccagagaagaaaaaaacgatcattgatgccataggatctgaaaaaaagaaggaactttttgggttattcgagaatacaactcattattgcccaatttgttttgggaaaagtctgtatctgcaagatccatgtatagagggttttagtgtaaagactgacgggctcctttctgttcatgatgttaaatgcagatagctggaaaggggtattcatttgcggaatcgaaatttgctttacttctccggttttttcggaaacttctttttcgaacggggaatttggattttatatttaacaagtatgaattattcattgtttctagtgggcatcctgcaatcggtcctgaatttggcgatgtttctggcggaagtgccgagcggcgtcatctcggacagaatcgggagaaaaaaatcgctcttgctcggccattttatggtcattatctatttggtgatgttcctgagcttccataacttcatcgccctcttcatcgctcatattatatacggtatcgggctgacgtttatatcaggaacggatcacgcctttttgtttgattcactgaaagaacaagggaaagaaaagtggtacggcaaatccatcggaaactataacggacttgtcatactcggtcttgcgattgccatgggcatcggcggctacttgcaggaaatatcatggtcatatgtgtttatcgccgggattgtcactcagctgattgcaatggcggtcattacacagctgacggaaatcaaatttgaaaacagtgaacacgaaacgcagacggtcggtgacatcttaaaagaagtcaaagatttcttcaggctgaacaaagcctttaaatatttggtgctgtcactctccgttttctttgcgattacatcggttttttatatgtacggacaggatttgttaagtcaggaagggctgtccgtgcgcaatatatccattatttttgcgggactgtccatcttgcaggcgctgtgctccatcttttcttcaaagccggcggaaaaattcacgccgaggcgcgtgcttctgctgacattctgcatcatcggggcggcttatctgtttataccttcgggcagtctgtacgtgacgattgcagcttttgtcgtcattaacgcgctctatgatgtgatagaacccgtatccagtcaggtggtgaataatgagattccatccagaacgagagccacgctgctgtccattatcagtttgatgacctcgctcttcatgttcattgcctttccgtttatcggattcttaacggactattttgattcagctttgctgctgaccgcaatcggggtattatccatcttattgtcgctgtttatgatgctcagcttctacaaactgaaagcgagcgtcgccatccagaataaagtcgagctttgaaccagaatgacaaagggatgatgtgagttgctgaatattcataatcttacggtaaatttagcgggggatacgattttcaaacaagtttcttttttcatcaatgaaggcgaaaaagtgcttgtggccgggccgaacggttccggcaaaagcacgctgttcagggtgctttccggagagcttgaggcagatgaagggacgattgcgattaacaaaggggcgaaggtcggtttgctgaagcagatcgctgatccccatgaagatctgacgttgtatcaatacctggaaaaatcgtttgaagctctcgcggcgatccagaaggaaatgaaggccattgagctgaagctttcggaaccgatgagtgatgacgagctgactgctttattggaaaaatacagtcaatacacggaaacatttgagcggaacaacggctaccagatgcatgcgatgattgacgaggtatgcaacgggctcagcctcagcgaattaaaggatcacccgttttcaaagctgagcggcggcgaaaaaacaaaagccggccttgctgaaattttaatccgcaacgacgacgttatactgctggacgagccgaccaaccatttggacgtccatgcgattgaatggcttgaagggtttattaaaaaatcgaacaaaaccattctgtttacgacccacgataaaacgtttgccgaccaaacggcgatgaaggtgctcgagattgacgataccgaggtgaagatttggccttacggtttcagcgaatacctgaaaaaacgggaagaattcatcatcgcccagtttgagaaatatgaagaacagcagagaaaaatacagaagatgaaggaatccatcgcccagctgagagattgggccaaccgctcaaatccgccgtctgtcggcctgcacagacgcgcgaataatatggaaaaggcgctgaaaaggattgagctgattaataagccggtccggacggagcaaaaattaaaaaacgcatttcaggaagcgggcgccggttcaaaagatattgtgttcattgaaaacggaaaggtgaccaacggatcttcccttttatatcaaaatgtgaacctgcgcataaagcataaagacagaatcggcatcgtcggcagaaacggcgtcggcaaaacaacgctgatccgctgcatcatcggggaaagagaactgtcggacggcaccattaaagtgggggaaaatcttaaaataggctacattgatcaaaagagccatgtaggagattcgagtcagacgattctgcaattctttaaagaaaatctgctgactgaagagggcatggcccggaatatgctggccaagtacggattttacgggtcgtcggtctttaaaaaactttctgtcctgtcgggcggtgagagaatcaggctgaagttgtccatcttaatggaaaaaaagctgaatgtcctgatcctggatgagccgaccaaccacttggatattgaatctcaggaaattctcgaaaacagcctgatgcagtttcaaggcaccatcatctgcgtgtctcatgacagaaacctgctggagaagttcaacaagattttctggcttgagaatcaaaacgtcaccatcttttcaggtccatacagttacgccaaacaaaaaaaacggcagattgccgaataaaaggggaatggatatgaccattgacagactgacaatcaatgagttatcgtacgatctttttgtaagcgagtatgctgataagaaaccttttattttgacgggggcaatggatcactgggaatgcaggccgtggacgcttgaatacattgacgaacactatggagacagaatggtcaccatccggaaatcagatatcgaaggggtcaaaacgtttaaacaagtaaagctttccaactatatcgagtacattgatcagaatgatgacaaatggtactgtgactggaattttacgcagctgaaccaaaatgacttagaccttgtctattccgcacccgagtattttacaaaagacacattgagagcggatgaagaaacgggacgggactggaaatggttctttctcggctctaagcagacaggcacgccgctgcatcaggattttaacaacacgcacgcgtggaacggcgtcattttcggggagaaggaatggatcttctatcatccggacgactctccgtatttgtacgaaggaaatatcaatgtctttgatgaaaaagacattgagcaaaaaccgctggtgcaaaaggcgtctccgatccgcttcagacaaaaggcgggagaaatcatttacgcgccgcgccattggtggcatcaagtcgagaatacggaacatacattggcagtgagtgagaacttttggtttaccggagagcggcttgccaatcagatataaacgaaaggctgaggagcatctcagcctttttttgtatggattcatttcatccggtccagaccgaattttttcaggcggtattgcaggctctgtctgctgattccgagctcgtttgccgttttggatatgttattgccgtgttttctcagggttttttcgatcatgtatttttcgaagttttccattttgtcttttaaatcggtgccgggctgggtgcttgcggcggctttgctttccgagtcagcgggtttgattttcatccggtattgataaggcaggtgggccgccgtaatcgtcgtttcatccgtcataaagttcatggcgccttcaatcatatgttcaagctcgcgaatgttgcccggccagtcatattccaggaagaatcgctgcacatcgtcactgatcgaatcgacatgcatttgaaacaggtgattgtttttctggataaagacttcggccagaggcagaatatcctccttgcgctcccggagcgggggaatgatcagcgtgacaacgcttaagcggtagtataaatctttgcgcagccgctcttctgaaatggcggtgatcgggtcttcattcatcgtggcgatgatgcggacgtcaatcggtttgtcctgagctgatccgatgcgcctgattttcttttcctgaagggcgcggagcagttttgcctgcaggctgagattaagcgagttgatctcatcaaggagcagggtgcctccctgcgcctgctcaaataagccgggctggtcgatggctccggtaaaggcgccttttttcgtgccgaataaaatactttcgaccaggctgtccggcagggcggcgcagttttgtgagatgaacggggcgcctgagcgctggctgccgttgtgaatgctttgggcgaacagttccttgcccgttcccgtctcgccggccaaaagcaccgatgatgatgtgcgggttgcccgttttgcgttttcgatgacttcccgaataaccgagctgttgccgagaatactgtcaaacgtgtagctgttctgttcttttctgtgcatgttctccctgatcagccgttcgagcttggtgacgtccttggcgatttccacggcgcccttgatctcgccgttttgcacaatcgggaaggtgtggttgatcgtcgtgatttcctggcctttgttattgaaatagctttgctttacatttttaatcgttttgccttcttgaagggcctgaacgagcgtgctgtcctgctgattggaaaacataaatacatcagtcaggtttttatgcaggacgtcccgttcatccatatcttcaatctgcatcattttcttattgtaaatgacggtgctgcccttctcgtccaccacatgcagcccgacatcaatctcttccagaatgctttgtaacacgagtgtgtaaaattcgctggttgtgtgcaggtcaattccccctctcaatcgtcttaacattcattattttaaaataaatcgaacgggaaacgcaaaaaaattttgcgcttggacgatgtttaaaaataaatggaaattgaggtaataaaaccattgacttttttagggaaatgattgatatttagatatatacttaaatatctaaatcatgtacgtatgagagggggaaagtttttgaataaagcttttaaagcactggccgatcctacaaggagaaaaattttggatttgttaaagaaacaagacatgacagctggtgaaattgcggaacacttcgacatgtcaaaacccagtatttctcatcaccttaccatattgaaaaatactgatttggttcacgatgagaggaaaggccaatttattatgtattcattaaataccactgtattacaggatcttataggctggttcttttctctgactgattcagaacatgataataagaaaggcggggaatcatgaaaaaatatctcttttcagcaggaatcatagttttaactgttttcacatgggtttgcacatattcatctttaccggacaatttggcgacacactggggattaaacggaagtgcaaatgattaccaaacgaaagctaatgcgatgacgatgcttattggcatcatgattattctatatattttaatggttctcatccctaagattgatcctaaaaataactacaaaacatttacccggccatatatggctatatttaatacaatgtttgcggttctgtttgtcattaatctgatgaccatcttgaccggcctgggatatgatctccctatatcttatttaggaaactttatagtgggagtcattttcatggtgtttggaaacttcattcagatcgttaagcctaatttctttttagggataagaacaccttggacgctgagcagtgaaagagtttggaaggatacacacagggttagttcgaaaatttttgtcttagcgggcatactcatgatgcttgcagcttttttgccgccggtatatagagtgtcagtcattttcattgcggcaatcggctgtatcatattatctttactatattcttacattgtatatcagagacaattgaataaataattgttgaataggagcaatctaattggattgctcctattttgtcagcgggaaacgcaaaaaaattttgcgcttggctgaagtttgcacgcaaactgccggaaaattttgcgggaaaagaaagaatgctggcgaaacatcccgttttttcggattggcacggaacttgctttataaaaagggaaagcaagatctaatgttgaatgattacaaaacaagggggaatcagattatgtcagctttcacaaaatctcaagaaattatcagccaaacttcacattacggcgcgaacaactatcatcctctgccgattgttatttccgaagcgcagggtgtttgggtaaaagaccctgaaggtaatcaatatatggatatgctgagtgcttattctgcggtgaaccaggggcacagacatccgaaaatcattcaggcgctgaaggatcaggcggataaaatcactctgacgtcacgcgcgttccataatgatcagctcggtccgttttatgagaaaacagccaagctgaccggaaaagatatgattctgccgatgaatacgggggcagaagccgttgaatccgctgtcaaagcggcgagacgctgggcatatgaggtcaaaggagtagcggataatcaggcggaaatcattgcgtgtatcggcaacttccacggcagaacgatgcttgcggtatccctttcttcagaagatgagtataaacgcggtttcggacctatgcttccgggtataaaattaattccatacggagacgcagaagcgctgcgccgggcgatcacgccgaacacagccgctttcttattcgaaccgattcagggagaagcgggcatcgtcattccgccggaaggatttttacaagaagcggccgccatttgtaaggaagaaaatgtacttctgatcgctgatgaaattcagacgggactcggccgcacagggaaaacattcgcggttgactgggaaaatatcgtaccggatatgttcatcttaggcaaagcgctcggcgggggcgtcttcccgatttcgtgcatcgcggcgaatcgtgacattctcggcgtgtttaacccgggttcccacggctcaacattcggcggaaacccgctcgcttgcgcggtatcgctcgcatctcttgaagtccttgaggaagaagggctggcagagcgttcccttcagcttggccgttattttaaagaagagcttgagaaaattgataacccgatcataaaagacgtgcgcggtcgcggcctgtttatcggcgttgaactgatagaagcggcccgcccgtactgtgaaaagctgaaaggcgaagggcttttatgcaaagaaacacatgataccgtgatccgttttgcaccgccgttaatgatttccaaggaagacttggactgggcgatccaaaagatcacaaacgtgcttcaaaacgcgtaaaaccttgatgcggcaatgctttccctcggcttgtatggaatttacaaataaaaaattcagcacactctatttgcgcggagacagtattttagtataatgtatctttatgtacgaaaatgaatttcatataacattcatatacaaatagaggctctttggacagcaaatcggtttcaaagcaccggcttggttccaatacaagttgctgaaggggtgcagaatagtgaatacaaatcaaaaagagaatcagcttcagcgcacaatgaaatcacgccatttgtttatgatttctttgggcggagtgatcggcaccgggtttttcctgagtaccggatttacaattaaccaggcgggaccgctgggcgcggttctgtcttatctggtcggcggttttattatgtttttgacaatgctctgcttaggcgagcttgcggttgcccttcctgtatcagggtcgtttcagacgtacgcaaccaaattcatcagccccgctttcggtttcgcattcggctggctgtactggctcggctgggcggtaacatgcgccattgagtttttatctgcaggacaattgatgctccgctggtttccgcatgttcccgtatgggtgtggtgcctcgtgtttgtcggactgatgtttcttttgaacgccattaccacaaaagcgttcgctgagtcggaattttggttttccggcattaaaattttagtcattctgctgtttataattttgggcggcgccgctatgttcggcctgattgacatgaaacacggcgagcaggctcctttcttctctcatttttatgaggatggattgtttccgaacggcattaaggctatgcttattacgatgattaccgtaaacttcgcgttccagggaacggagctgatcggggttgccgcgggagaaagtgaaaatcccgagaaaacgattccgcgctctatccggcagacggtatggagaacgcttgtctttttcgttctctccatcatcgtcattgccgggatgattccgtggaagcaggcgggagtggtcgaaagcccgtttgtcgtggtgtttgaacaaatcggtattccatatgcggccgatattatgaactttgttatcttaattgcgctgctctcagtggccaactcaggcctgtttgcatcgacgcgtatcctatatgccatggcgaacgaaggacaagcctttaaatcgctcggcaaaataaataaacgcggcgtgccgatgaacgctctgatcgtgacgctggccgtcgcatgcctgtccctgctgtctaaggtggctgcgccggaagtcgtttatatgtttctcttatcattagccggactaagcgcgcaggtcggctggattacgatttccctgtcgcagctgatgttcagacggaaatacatccgcgaaggcggcaaagtggaagacctgaagtttaaaacaccgctgtacccggtgctgcctattatcgggctgacgttaaacacggttgttctgatcagtctcgcatttgattcagaacagcggctcgccctttattgcggcatcccgttcatggcggtgtgcgttatcgtttatcatctgtatgtaaaaaagcataagcagtcagaaaaacagatagagctttaaatcttttcgtgtccaagtcatctttgagaaacccgcacaggacaacatacaacatgttgaggtggaaaaacggatgaacaagaatatctcagttattggaatgccgatggatttaggacaagcacgacgcggagtggacatgggcccgagcgccatccgctacgcgcatctcattgaacggttatctgacatggggtatgcggtggaagacttaggcgacatccccgtcaatcgtgaaaaactcaaaaatgatgaagagctgaaaaatttgaactctgtgctctcggggaacgagcagctcgcccaaaaggtggacagcgtcattgagaatgagcggttccctctcgtcttgggcggcgatcacagcatcgcgatcggaacgctgacaggaacggcaaagcactataaacagctcggcgtcatctggtacgacgcgcacggcgacttaaacaccctggaaacatcgccgtcaggcaatattcacggaatgccgctggccgtcagccttggcgtcggacacgacacgctggtgaacctgggcgggtatgccccgaaaatcaagccggagaacgtcgtcatcatcggcgcgagatcacttgatgaaggcgagcgtgaatacattaaggaaacaggcatgaaggtctatacgatgcatgagattgaccgcctcggcatgacaaaggtcattgaagagacgattgactacttgtcagactgtgacggcgttcacctcagccttgacctcgacggccttgatccgagcgacgcgcccggcgtaggcacgcctgtcgtcggcggcatcagctaccgtgaaagccacttggcaatggaaatgctgtatgatgccgacatcatcacttcagctgaatttgtcgaagtcaacccgattctcgatcacaaaaacaaaaccggcaaaacagcggtcgagctggtagaatctttgttaggaaaaaaactattataaaatatgcgcctccgcacttgcgggggttttttttgttgccacgaggaaactagcgggctgtcaccctctttttagacctgtaaatatgatatatttattacacaaaatgggaaagggaggtgtcctgacagatggctgaagtgatggcccacgaaacagttgcgaaaaaaatcagtgactggtatgaggaaatcaaaaagcacaacaccgaatcggctgaggcgttaagagaacaactgcttacggatctgcaaaatatgacacaaaatcaaacggtgctcctttattttaatttaattgattcccgctataagcttttgatggaagagtatgagaaaacagacggcattttaaaaacgatccagctgaacgccgataaagaaaaaacagaccagatgattcaatactattattatttcttttccggaatgcacgagttttaccgtaaacggtttatgaacgccattaatttttaccggattgctgaaagcaggcttcggcacataccgaatgagattgaaagagccgagtttaattatcaagtggcgattgcctactatgaaatccgccaaaactactttgcgatgaaccacgcggaaaaagcgttggagatctacaaagccaatgaaatgtacgcggtcagagaagcacagtgtttaatggtgatcggctgtaacagaatggacttgtttcactaccagaaagccgaagagctcctgcagacggcggttcatcaagccgccaaagcgggcgatccgcatattgaggcgcttgcccactttaacgcaggcatttgctatgaaagacaggaaaagcttgaggaggcgcggatcgagtttgaaacggctctcgatcaaaaggagcatttgcaatcagcatattcggtgcggagtctgtacatgctggccagagtgttattgaaacaggaacagacggatgagggccggttttggctgcacaaagcgctgaatgccgctgaagaaaaaaacgagcccgtatacacccaaaagctgcgcatcttacagcatgtctttattgaccgcaatgaagaagcgcttgaatcagctttcgccgagttaagaaggaaagagctgtggagtgacgtttccgatttgtcgtatcaggccgcggcgcattttaaaaaacaggagaattacaaattggcggcgaagtattttcaagaatcaattgatgccaatgaccaaattttgagattaacggaggggattcgtaatgaaaacatgtaaattcattgtactctcagcagccttggcaagtctcatttcgattggattatttgcgcaaactggttcaacggcacaagccgaacaaatcataaaaccggcggaaaacggagccttcggataatactgcatgataccgctttcagtctgtgttttgtaaggagtgattcaatggctatcacactgcagccgatgacaggacaagaatttcagtcctatctcgcccattcaaccaagcattacgctgaagaaaaggtaaaagcgggaacgtggctgcctgacgaagcaccggaattagcggagctggcgtttgaagacctgcttcctgacggtttggagacagccgatcactatttatggacgctgacattggacggaaaggaaaatgccggctggctgtggctgcacgccgatccggaccacccgcagcaggacgcatttatttatgatttcggccttcatccgcctttccgcggcaaaggctatgcgaaagaggcactcgcaaggctggaggacaaagccaaagacctgggtgtccgcaagatttctctccatgtgttcgctcataacgaaacggcgcggaagctgtatgagaagaccggatttctggagacggatgtcatcatgagcaaaaagctgtcatgaaaagaggcccgcacgatgggcctcttttgttattcatctaacaatgtcatcatgtgttccggataacgctcgccggccgcggtgccgatcggaaacatctcatccaactgcgccttcacatcctcgggaagcacaatgtcgagagcggcgaggttttcttccaagtagtgtttcttttttgtgcccgggatcggaatgagatcatcgccgtttgcgagaacccatgcgagcgcaagctgtggcgcggtgatattcatttcccgggcaatggcggtaagtttttggacgagtcctatattcaccgctaaattgtctccctggaatctcggcgttcttcttctgtaatcatcggcatccagctgctcggtcgacgtcatctttccggaaagaaaacctctgccgagcggactgtaaggcacaaatgagataccgagctcacggcaggcgggcagcacatgctcctccgcttccctgctccataaagaatattccgattgaagcgcggcaatcgggtgaatgcggacggcgcgcctgatcgtttctgcggaagcctctgacaatccgatatatctcacctttccttcgtctatcagctccttcatggcaccgacagtttcttcaatcggcacccgtggatcaacccggtgcagataataaaggtcgatataatccgtcccaaggcgtttcagactggcgtcacacgcttttttcacataatcgggccgtccgttaatttcgataaactcacccttttcgcttcggacataaccgaatttcgtcgcgaggcacagctcctttctgaatggggcgagcgctctgccgacaagttcttcattcgcacccaatccatattgatcagccgtatcaaacaaattcacgccgagatgaacggcatgatgcagtgtggaaatcgactcttcctcactctggctgccatagtattccgacatgcccatgcaccctaaccccattgcggaaacccgcatcgaaccgatcgttctgtccttcatatgtcctccccctttcttgtatgataaccggatttcctgatatttgaaaatgatttatgcataagatttacatattgttataaaatttttaaaaatctgtaaattgtatatttttttatcacaatttcgtcatataatgaaaatgtggaaaaattatactcgaagaaaagaggcgaagtcaatgtgtaaaaagctgttcaaagccgtcctcccgtttgccctgtcattcaccatggttctgtcgttctccggtttgaatgtaaaagcgaaagaaacagaagcagcccgctacgcaaaagaaatcgcagaccttcagcagggcacgactcctcaagacgttctccaatccgccaaagagcttgccaaacagaagcacgtttcaacagaagcaattctcaagcagtttcatcaagaaatcacggcagacaaggtgcaaggaaatgtaatcgcttccaaagaagggctctctgcaatgggcggatcatcaggcacaaaaaaacttccgaaaagcacaaaaggcaatatttattacacgaactcatacacggcttattacaaccacgggcatgtcggcatgtattcatccgctgataaaattgttgaatccgtgccgggagacggtgtccgccagattgcttataacggcagagaagtcgaagacaattcaatcgtccagaccgtaaaagtcaccgactctcaaaaacaagccgccgctgactgggctgtatcaagagtgggtgatgaatactccttcaacttcgtcaataacagaaatacgggccatgaaggcgccaaaaactgctcaaaactgctgtggtcggcattccttttaaaagcggggattgatatcgactctaacggcggcttaggcgtatatccgcgcgacatcacaagctcgtcctacacaaccacgattctgaccattcactaaggagaataacgtgaaaaaaatcatctggatccccttagtgatcatcgccgccgcagcggtcttatgcttcttctattttcgcacggaagatcctgcggaggttgcgagagacacattaaatgaccctgattttctgaaagataaagaggcgctgctgtatttctccactgccgctgaccaagacacgttcggcggcggaaaaagctacgccctcttcgccgatgaaaaaggacggctttcttcttatcaaatgaaggggcttgagctcggctcggccaaagtgcatgacggcagcgtgctgctggaggacaaaaaaggaatctataccgttcaggacggccttcacacgtataaaagagcgtaccagcatacgggagacagcgcgggatatatcgagcgggcgaaaggcttttacacgctgtataattcgggctacgacaagagcggcggcagctatcgctcagagctgtaccgccagattgacggcaagtggaagcaagacgtcatcccgcactatatccgcgcttcaggcttttttaaagatcatcttttcgcactcacgccgacagatgacgaaaaaggctatcacgtccaagacattcaggccgataaagaaaagctccatacaaaatcaatcgcgacatggacgtataaagaaggcacgtctgtcgaatcccagctcgccgcggacgacagcgccatctgctttgtcaccagaggggaaaaagccgatcgcatctatcaaatggtgaaagtcatgaaacacagcggcgctatcaaaacatatgacatcgcaacttataaaaatgacgaacagactatttatgactccatgccgttcagcttcaaaaaaagctttttcatggagcagcgcagcttctatttcgttgacggcttcggaaccgtctaccgcatcaaccctgagaccggaaaaagcaaaaaggccttcaccctccccgcatcacgaatgaaggccgacttcaaggagctgacccatcaaaacggaaagctgtatctgttcacgtacagctacaaaaagcccgccaaaatcgaatccttcgacctgaaaacgggcaaaaagctgaacgaccggaccatcccaaacctgaaaaacatcgtcacgccgaaaagccatctcaagctgtacgatgtgcaggtgatgggtgggtgaacatttgggaagagcttgccgcttttggtaagctttttataatgaaacgttactgcaagaaagaaggggttcatttgaaatcattcagtatcttcttattgttgtccgtcatttgtataaccattgtttttgtcataatgaatatgttgattggataccctgatgtgagtaacggggcattgattatgattgtatatatcgttgtgaccctcatgataaggctatataacaagagaaaagccgaccgaacatagagatagaggaatttaggagggagccgatgaagaaaaagcttcccgcgtttttaaatgacggaaagccggacgggattgatgtatgctgtacgctgctggcgtgtatattaggcattctgttcgtacttcgcttagaaaaaagagaaaacacgtaaagagccgggcgccaatcgccggctctttttgcgcgtgatttgccgaattgtggataaaactcagcccgaagcactactaacatgtgtataaataggttatattgaaaagagaacaattgccgcgcgcaaaagaaaaccggaggacgtaactatgaaaaccgcttattattcttgtgaagaacatatcgaaaccgtgctggacatgtacatagatgatcatgagcttccgcccgaaatcagaaaaatcgaacatactaacagtttatccacagcctgtgaattatgtggggacactgcaacatatctagtagggaacgaatgatcctacacaaaatacagaaaagatatccacaattgtggacaatatatatgaataacttgtttctaaagtggggatgacctgtgaatatcaatattgtgaccatcggaaaactaaaagaaaaatacctcaagcaaggcattgaagaatacaaaaaacgactctcagcctacgcaaaaatcgacatcatcgaactcccggacgaaaaagctccggaaaacctgagcgaccaagacatgaaaatcgtcaaagacaaagaaggcgaacgcattctggccaaaatcagcccggacacccacgtcatcgccctcgccatcgaaggaaaaatgaaaacatccgaagaactcgccgatacaatagataagctggcgacatatggaaaaagcaaaatcaccttcgtcatcggcggctcactaggactaagcgacgccgtcatgaaacaggcagacgacaaactgtcattttcaaagatgacgtttcctcatcagctaatgcggctcatactagttgagcagatttatcgggcgtttcggattaatcgtggggagccttatcataagtgagtgaggtttattatattatgctagttttcaattgcttttgagtaattatagcttatggaacgggaactaggatttattattttttttataaaaaaaagttgacgccattatatatttaaagggttttagaatcacaaataaagaagtgaatactcatttgtaaaaaaggtaaatttgtttatatgtttgtaaaatatttagataataaataactatgtattactttaaaatcacttcatcaagtttataaggagggactagaaatgactgaaaatcttttttctaaatctgatatgggctccaaagctgcttggaaaggcttttcatctcaaacgatatacatcgcttatagactaattaaccttcaagatagttacaatttctatccagaacaagttgaagacttattaataatgaatgatgatattgctgaagaggttattcaaattaaaaatctttcttccaatctttctttatcaaatttaaaaccaggtgaaagtgattctttttttcgccggtgtttatcttacaaaggaagtagtcccaatacaatattaaaaatagtatcctttggtgaagttggtccagaactagctaatctcaataaaaaggaatcggtgtatttcaaaagagttaaagaaaaattattaacaaatgggtataccgatgatgaaattgattggatcagccgacaacttattattgaaaaagtagatgaagaaaaattattaagtttcattaacatttatttaaaagagtctgttgaaacaatggctgctccaaatgtgtttttagatgtcttaacccaatatgtagctaatctttcaagatattcggactacacaacgaaaaggttatggcaagaaaaaattcagcaaataggcattgacttagcgactatcagaggtgttgcaaaagagtatggcaactcaattttacctttggctgaatataaggaaatcggaaatagagaaaaattaaaagaggaatattatgcaggaatcaacgctcaccctcaacacatccggatgaatctagatattgagagaacatactgggtcgaacaaatacataattatttttcagaggaaaaattagtaataataaaaggggcatctggtcaaggaaaatcatctttatcgtacagataccttcataatcattattctgaaaatgatgtgatatgtatagagtctgttactggcgaagaacaagcacaaaatataataattgctcttaatggattagctaaaaatcgaaataatctcattgtatattacgatgtatctcctaaagatttgaattggacatggatttgtgaaaagcataatgcatatggagcaaattttaagctattagtctcaatacgagaggaagactttagaagagcgaattttgatagttcacaaattcctcttaagtttattaatctaagtttaagtaaagaggaagcagaatttctttttcatagatatcctaattctgagtatcgttcttttgaagaagcatggaaatattttggtgagaaaggtccattaatggaatttacttatatgctgaatcaatcagacacattaaagcaaaagttaacttctcaaattagacaaatatctatgcgaaaagattattctgaagaatggttagaggtattattaatagttagttatgcaggtaagtttggaatagagataaatgcaaaaaagcttttctccaatatatccataaaaaataaaggaaagatgatttatcttcttgaaagagaatatttgcttcgtgtatctactgataataaaaaaattaatagtctgcacgttttaagggcaaatataattagtgaagtattgttagattttctttttgctgatgagaaagatgtgatcagtaagattctaaattcggttaatgaaagtgtattgtttatgttaacatcatactattatgataacgatattgacgaagaatttatttgcgttttaaaaaatataaattatgattcttggaaatgctactctagtgtagttagatcgttgatttggtatgaattaatgaatttttacttagctaatcaacaagttatttttgaactggatgaaataatgccgggtaaatttccaatgttattattaggtgatgtgacaggactttatccacattataatggaaaagaattatttgatactattagagagcatcagcctgatagagtagaaaaaatggaaaaactcttagattcaattaaaactagatccttgggatatacaacagtcgatgaatttatgggtggtaccgttgataagttacctatttgtagaggcgtagatctagaagaatttaattctgcaggctatggattattttggctagctttacgaggattttatgtagacaagggaataatatgcttaccagaaggtattgagaataacggagaatatctagatgcattgttgaacctattggttggaattcaacaacagaaattaactgaagtttatgagggaatctttttaaaattacttgaacagataaagaatagatatgctattgtttatctaagtgaaaacgaggatatgtacgaggcggtatgcattataaatgtatatgacaaagaaaagagcgaaatccaatttggtaacgaatatattatgtcaattgtaggtgcattaagaagactctgtattaacaaaaaacagtataatgtgaaattaattggaggtcaattgatagataatgttaaagtaccagaaatggtaaagacaattaatgaaaaaaacttgccgtggctatggattactgaaataaacgggtggctacgcaaacttcatgagtataaattgttaccagatacttgggaaatagcaaaacaatcgatgcgagattgcgttagacagaatatggaaattttaaatactcttgaaaaggcaatagaacatctatacaaaaaaggaaatacaggaagcatgaatctaaagaagttagtagaaaaaataaatgttgtcatgactagtttgaacaatgaatatttatattatccaaaaacttctgttgatagatttggtatagataatactaaggtaattgttaagcaaagtaatagtcctatgacacaaaccaatacccctctactatctaataatattcagaaaaagagaaagagttttaatgatttatttgcagaattcagaagaaacttaggtacattctacaaaaacatgaactctttattaattgaaagagttaaacatgaggaagtatcccatagttctaggatttcctatattaatattgtgaatgctctggatattatcaataagttaaactacttataccatgaagaatttccgatggagaaagaaagtataatttcaagtaaggattattatcaatttcaactcttttcctcaatttggcataggctttataaaggaaaacttagaattgagcgaagtatgttatatgaacaaaaagagtatataaagagataccaaagaagaattaatacttttttggaaaaaacgatagcaaattatataggcgtacttgaagttaaaaagtttaatgataaatttgaagtgattatagatttttcaagtattgaaaatgtatttaatcaattggttgaagactttcaaacaacttttcctgaaatagaggtttacacatttgaaaatagtatgtggaatgcaacttttaactatatttttattacaacaagtttcttagaatataaggttcccccgtcatataaattggaaagtgataagtttgcttatattaaagatgtcaacagtttaatgctatcaactaaaaactctgaacaggttaaaattgaaagtaacattttggatgctttcttcagatataatgccttaaagcctgaattacacactatatttaaacatacaagtcaagtcaatcaatttttgaaacaaaaagagaatgatgaattctttaacaaagatatctttgaagaatggaataagaatatgacctattatacaataaatatccttaatcaaatcttatctaatattaaccttgtaaaaaaagagatattatatgattttggagagagtaaaaatttagatggaataatgaatgagatagaagaaatagatgggatatttaaagcaaatttgaagttccttctttcatcaaatgatcaagataaaggagatgattatattaggcgcctttttgaattaattgagaacttcacagaaataaatcaagattatattgcagcgttagtgttgtcagattgataacctcgtttagatacatttcggtaagccttataataagggagtgaggttatatgtgagtaggtgactatgttaagtcttattctaggttttgtagtttaaatattgaaacttttacaaaaagtctgtaatggtaccctcaatgataaaccagaattgatatacaaagtgtattataaactttataataataaatcatagaaaaatatcacaaacgattgttaattttgtttaaaataaacactacagaaaaatttaatggttaactcattgaaactagttcaaagagcggaattatgggatgagcaaaatgaaaatatagttgagaagttatacgtagatcacttaccaaacgatggcctacttagggaaattatacaggatgatactgtttttttggtgggaaaaaaaacaggagagtccacgatttttacaagggcccaagaatattctcgtataagtaaaagtgagatttccgcatatgttgatgtaaaaacaatgtacggtaagtcccaagtcaaagaactaaatgaggattcagattattgtaaaaccttactttgtaattgttttattaaatcaagtaataagcgacttattaaaagaagtgaataagaacacaaaaaaatgcactttttagactttggaaaagaaaggacttagctgcccttctttccagattagaggacattaaaaaagaacctcaaaaccgagtacactgattttaaattgaaaggggagggttatagatgaagtgtaaaatatgtcggaaaactataactaactcttatactttttgtcctttttgcggccatgctctagttcataataatacttttaataagataacaacaggaaacaatagtataaatgtaggggtgggaaataacggcaaacaagatgtctatattgataatattaattatataaatgataacaatgagttagtggttagatatagtgaacatattgatggaaaagttattggtggattaaatagttttaaacgcaaatttgaaattacaggttttttatcaattatatcagcattagttactttaatagattattttattacggaatctaattatacatttttattctttttatgtggtgccgccatgctgatatatgctgttgataataaacaaaagtatttagatttaaaaatcaatggcgtattttataaatcaaagaatcctaaattaattgataaagacggggatatttataaaataaaaaaatatggaatttgtccagtctgtaatggaaaagttctcatttattatgataataaattcaagagaagtttaggtaaatgcgagaataataatgatcatctatatacatatgaccatacaattgatgctggagtcccgtatgtagttttcgacatttatcaggcagaatagaaacataagattattgatttaaatataatttaggaacaaacaataaagatatttgatcggaagataagttaattagcgaatttataaatgtcaaaagttttaacgggctagttggtcaataatatttgttaacagaatcttcctattgatcatagatatacattatgaacttgttccttagttgaaaacaaaaagaatacacaagggtgttacatttattatctttatgacacaatgagctgagtttctattatatttattttaagagtaatatcctatcctatttaacttgcataacaaattaataaaaatcaaccgccaatatagtctttcctagatatattggaacaaactaagagagaaacgattagtgttcaaatgttcattatgaatttttaaaatagaatcccttaagcagagatacttgattagtaagtcggctttgtcagcatattcgctttactgtgaattctcctgttaacttatagtgtataaaacacaaaaaaaacagatgccactacaaatccggtttccatagctaagagaagcaacctactgttgcttctctttcaccatctttataaagagaaagaagacaatgaatacgataaaataattcaatggattcttaacgatgcttatctccagtgaaatctgtaagagtatccagagaatgaagatggctagtattgaaggaatgatgattttgtacatgtcgaccaccttccatagttagtaaaagaaaggggcgcgggcccctttttcttcatgattaaaagcaagatgcggcagctcctgtcattgcgccgccaacagcgccggtaattgctccgacggcacccgctcctactgttccgatgccgggtattgtaactgttcctacagcagctcctgcgagacccagtgtgccgcctccagttaccgcaccgccgccagtacctaaaatacatttcccgactgattgggtgctgattgaaccgcccgtttttccagcgtctttgttcacgactttgactaaaacgccatttttgattttttcatatttcagtgtaacgggttcaccatttttgtcagtggagcttttcggaagagcctgctcctcgcccgttatgttgtcttttagggttgccttgcctttagcgtcaatatgaacatctgcatgattgaacgtcatcttcagctcactgtcgttgaggttttcaactttgtatgtagcttgtgattctgcggcagccgcagaatggggtaaaaccgggagggcaaaggcacctactaggaataccaaggctgccagtttcactgcggttagcttcattttgctttgcataattgatcctcctcctttggttgccatactaacaaaggcattctgcttcttaaacccttaccatataaaatgataaaaaattcacccaatttcatcacattaactaacaaggtttgtatgtttcccttcgaaagtcataggggagcagggttcatatctgatgcgaagttatcaaggagggtagaaaccagaagagcccagagaagcacctttattgcaaacaacagctccttttcgcattttccctacaacagtataaatccctttgcgtcacggaaacctagtggaaaaggtttctgaaaggagggggatatgatgaaaagtgaaaaaattcaaaacaaaacatctttggtttggaagatggcgattgcctctgcggttgcttgggaagcggcaaaactggcgggctctgatcatccctatttagcgccgctatctgttatcttatgtttgcagccaacgatagatcagtcgattcgcttttctttccatcgtattgcgggaactgcgattgggatcatgctaacatcctttcttgtcagtcacttaccaatgaatggctggatgttgggtctgttactattaggcgggacgtacattgcaaagtggttacgaatagatgaaacggttttacatcaggtagcgctcaccattttgttggtctttacgtttgaacgaaactctaaagattatgcattcgaccgaataatcgatacggtgatcggcgtcatcatcgccattctggttcacatgttcctttttccgccggactacacaaaaaaggcagcggactcttttcaaacattggctcgtcagctttccggcacactttcagacctttccaaatgggttcaatcagagtggggacaaggaaaagggaaccttatggaatataaaatgaacaatcttctgcaggagctgcatacggcaaaagagatgatgcaaacagcctctgacagcttaaaattcaaccccgtcagaaaaaaacataaaaacatcatttcaagctatcaaatagagatgcaaaagttgaacgccggatttgagtatctatcaaatatagtgaaaacgttaaaagaatgggaaaaagaaggagctttatcttcaagtgacaaaagggagctggggaatgatttacaagtgttaagtgaatactttgcgggttttaaaggcatacagcagggtgaaacagacaattggaaacagaaggaacagaacatggtattggaatctctccgctccgacatgctgtcgcacccgccgcccggtcataaggtctataaagactctttttttttagaaacgaagaaattgctgaagcgtttgtaatgttttctggaaataaagaatacggatatacagatgcagatatgatcaggtaaaagcgggggacatgagatggatgatatacaccggattttggatgtcatcgccaattctaaaaaagctaaggtactggctaccatcattaaaacagaggggtccgcttataagaaagaaggggcctccatgctgattttaggggataaaacaagagtcggaatgttatccgccggttgtctggaagaagacctcgttgaacggtcggaacaggtctggactgcaggagaaccgttgattgtccgctttgatatgagctcggaagacgatttatcctggggacagggcgttggctgtaatggtgttttgacggttttacttgagcctgtaaaaggggaattggaacgaaatctgatgacagtcaagacatgcttagatgaaaaaaagtctgtgacccgaatgaaacgattcactaaaacgttagagccgaaggaagatctgtatatagctgaagacggcagcgtgtttggaaccggggatgttatggaacaaggccgtattcaaaaactgagacagacggaaaagggaatcaaaagggatgaacatacctctgatttattttttatccatcagatggtgccaaaaccttgtttatatgtcttcggagcaggggaagatgcgaagccgttagtttcgttggcagctcgtgcgggttttcatgtgacggtgattgactggcgtcccgctttatgtcatcacggccattttcctgaagccggccatttgataacgggagcaccggaagaagtcatggaaggtctgagcatgacaaaaagggattttgttgtcattatgacgcacagctttcaaaaagatcagatcattttacatacatttaaaaataagaatgtattttataaaggcgtattaggccccagaaggcgcacggagcggctattaggcggggcagagattccggaagatatacattcccctatcggacttcccatcggggcacaaggccctgaggaaattgctgtaagcattgtcggcgagatgattcaaaaaatgcgaaaacaaaggtctcgcttatgaaaacagcggccatttacctggcagccggtacaagcagacgcatggggacggataagcgaagtttgtttctcaatggcgtctctctgggaagtatggctcttaaaaatgccttgttatctgaattagatcatatttttgttattacgagaaagggagattcactgcattggctttcggattttttctttttagatcccatatcaaataagtggagtcaggcagaatgtgagcaagcgggtaagggccaaagccattctatacaatgcggtgtaaaaaaagcggcagagtacgaggctgacgccgttatcattctccttgcagatcagccgtttgtcacctcagatatcatcaatacgttaattgattcctatcaaaaggagcgccgctatttatttatcgccgctgaaaatcagcatcttcctatgccccccattttattctccaatcaatgttttccagtcttgtatcaattaaagggagatcagggcgcccggcatgtcatccgtgaaagtgtgatcaatacgggaaaaatgatcagctttcaagaccctttgcttttttatgacgtcgatacagctgaagattatacgctgctgctgaataaattcggggagtgaatgagttggagtatatcgggaagagtgtcattcggaaagaggcccttgaaaaagtgacgggtaaagcgaaatatacggatgattttcaagaaacaggcacattacacgcaaaaatgctgatcagtccatatgctcatgccgatattgtgtctatggacttttcagaagcttggaagattcccggagtgagagcgatattggggaatgaaccttttccgcttgcaggtgaggaaattaaagacagatcgccgattgcttataaaagggtcagataccatggtgagccggttgctgttgttgttgcggaaaatccgattacagctaaaaaggcagcggatgccatcaaagtatcctataaacctcttcccgtcgtcaattccccccgtgaggcctttcaaaaggatgcgccactcgtccatgaacatgcggaccgctatgagaagacaaaaggtgtattcccggttccgaagacaaatatcgcaaacctggataaggttagaaaaggaaatattgaagacgggtttagggaaagtgatgtgacagcagaattccagatttcctttaacccttctgatcacgctgcgatggagacaagatgctcgatcgctgaaattcgcgcggatgaggagattatcattaccacatcctctcaagctccttttgccattaaaaaattaatgcagtggtattttggaattgaacccggaaaggttatcgtcaaaacgcctttagtaggaggagcgtacgggggaaaagcagccgttcagttagaggtgattgcctatttggcatcaaaagcagtcggaggccggcccgtcaaattatttaatacgagagaagaggatctgatcacatctcccgttcatatagggttggatgctattgtcaaattaggggctacaaaggatggaatcttaaaggcggcagacattcagtttttatttgatggcggagcgtattctgataaaggagtggacatcagccgggctgcggtggttgattgtacgggtccgtacgctatcgaccatatacggtgtgattcatattgtatgtatacgaatcatccatatccaagtgcattcagggggtacagccatgctgaagtgttattcgcctttgagcggacgatggatgtattggcggaaaaactgaacatggacccattagaactccgctataaaaatgccattcgccccggcgacaccacaccgactcaagttcttctcaattcaagcacggtcggaaatgtgccgaagtgcattgaaagattgaaggaattaatgaattgggacgagggacagcgaattgaaatcgatggcgggaagatacgggcgaagggaatcagctgtatttggaaaacctcaacatttgatacaaatgcaacttccggggttcttttaacctttaatcccgatggaagcattaatttgatgtcaggcgtagtggaaattggaacagggacaaaaacagtgctagcccaaatcctggcggaacgaatgaaaatggatataaacaaaattcatgtaaaaatgcttatagatacacaaacaacacccgagcattggaaaaccgtggggagcagagggacgttaatggccggaaatgccgtactgaatgcagcggaggaagccattcgaaagcttaaggacgtggcatcatgtgtgttgcgggttcctgtcgaggaattggaagtggccgacggaaaggtttattttatagatcatccttctgtacatgttgaaataaaagacattgcttacggatatacgtttccgaatggaaataccattggcggccaaatcattgcgagcggcaattacacattaacccggatgacgaatttagaccgggaaacgggaagaggaaagccgggacccgagtgggctgtcggtgctcaggggattgaagttgagttggataaacgggattatacgtaccgaattacaaaagcctattctgttgtggatataggaactgtactgaatgaaagagctgcaaggggtcaagtgatgggagggatgagtatgggaatcgcatttggaggaagagaaacctttgtctttgattcatatggcagagtattaaatcctcagcttagaacataccgcccccttcactatggagagcagcctgaatatatcattgaatttgttgaaaccccgcatgtgattgcgccttatggagcgcgcggaggcggggaacacggactgttggggatgccggcagcattgggaaattgcctttccgccgctttaggtgtccaattgaatcaacttcctctcattcccgaacaattatggagaacgcaagaggggtggaaagatgataccgtttgatttcgactattttaaaccgaagaccattcaagaaacaacccgcctgtttcactcgcttgcggccgaaaagaaaacaccaatgtattattccggcggcacggaaattatcacgttaggaaggctgaatatcatctatacggatgcggtgatagacatgaacgcgcttccgggatttcacaccatccgcttttatgaacatgatctggtgatcggagcaggcgtgtcattaacgaaactggaggaagaaaatccatttccgctattaagtaaaacagtaagtgaaatagccgataggacgactcgaaataaaatcagcctgggtggaaacatttgcgggggcatctattaccgtgaggccgtgctgccgttgctgatttctgatagtttgctagggattgcagggagagcggggattcattaccatcctataaataaagtatttaacagggaaatacaattgcgaaaaggagattttttatttcatgtcgttgtcgatcgtgtgtatgttgacctgccatttgtcagtatcaaaagaagacagcagtggaatgtcgggtatccattggtgacagtctgtgcgctgaaaaaagatgatgagatcagaatggccttcagcggcgtatgtccatttccgtttcgttctgctgaaatggaggctgtgcttaacgataaaagccgatcagcagaagaaagagtacgcaggtctttacagtatgtacccaaacccgttcttgatgacgcagaaggctcaagtgaataccgaatatttgtcttgcaaaatacaattttagatgccttatgggaattagaaggaggtccaaatgtctgatcctattacgttgaaagtaaatggcgaggaaaggcagattacggtcagaccggctgatactttgttatttgctcttcgtcttcgtctcggattaactggtgcaaagccgggctgcttaaatggggattgcggcgcctgtacggtattaacggacggggtgccgatgaaatcttgcttaatgcttgcggcagaaggggaaggaaaggatattacgaccattgaaggactgatcaatacgccgattcaaaaggcttttattgaaaaatttgcgtttcaatgcggttattgcacaccggggtttctcatgaattgtcatgctttagtgaatactgagccgaatgcaagtgatgacacgataaaaaattggctggagtccaatatttgcagatgtacgggttatagggagattgaagaagcggttaaatccgttttacatacagggaaagggacttcttagttcgcaaccgtaaaaaaagagcccagagaatcatccctgaactccatattcttcacttcatataccgatactcccgcagtttctccaaaatcgccacttctttcatcagttcttcaccgacgtttgtttctttcactttcttccgctccagctctttgtcgactaatcgtttcactgttaagacgtccgttccggtgttcagcacttcggccttggagttaaagtgtttatgggcgacgagctgcatgccgtaggagttgtataagagcgtgtagccggcgatgcctgttgtggattggtaggctttggagaagccgccgtcgatgacgatcatttttccgtttgccttgatcggatcttcgccttcgatttcttttaccggtgtatggccgttgatgatatggccgtgatccgggttgaggccgaattccttcaggatgtttcggcaggttgcttcgtcttcacgcaaatagtaatacgggtttttcttttctttatgcgtttccttctctttaatgaaataacgctcaaaggttgtcatggcgcgttttccgaagagggaggagtattcgcctgtccataagtaccacgtcatatctgtcgccagatcatcggtttcttccggatgggcgaaggcttctcgtaagaaccgttcaaatacatcgagcagctcacggcctgcataagctttatcctctatcatcatcgtttccatgctgccgttttcatcgacgggaatacagccgtgaatcagcaggttgccgttatattttaaataaaggctgccttttttcatcataaaattcatatggcggcccagcttttcggagttctgaacagagaacagcagcttgtccatgacttccgcttcttcctctaacagctcgtcaggctgtttaggattcaccgtcgcaaagcaggtgttttccagttgatatgtttttccgttcagcgtgatttcattgcggtcataatcgatcttttccagtaacagccgttcctccatattaaagttcggccgtctcttaataatcgggctctcaagcttgaattggatcatcgcgatcgcctgatgaatttttgtgatttgtttaatctcatcttccggtctgttttcgtccgctttcgggcggaaagacgggttatcatcgtaatatttttcggcaaggttcaatagcggtctcagattgatgccgtaaacgtcttcaataatatccagattgtcatagcgggcacagatgcggataatgtttgccaggcatacttttgagccggaataagcgcctatccagagaacatcatgattaccccattgaatatccactgaatgatagttgatcagttcttccatgatcttatccggctgcggtccgcggtcataaatatcgccgacaacatgcagatggtcgaccaccaatcgctgcgtgctgtaggcaagaccggtgatcagcttatcggcctgaccgagcgcaatgatctgttctatgatttcggaatagtattgttctttgttggcggcttgttctgttttgtacagcagctcttcagaaatataagcaaattgggcgggcagtgctttgcgcaatttggagcgggtgtacttggaagaacaataagaaacgagcttaatcatccgatgaatcgtttctttataccactcatttaatgcctctttcgtatcaaagtcatgtttgatcagctttagtttgtcctcagggtaatagaccaaagccgccagttcatcaatttctctatcgtaaatgacgccgctgaaaatatcgcggatcttctcttttactcttcctgaaccgttccgcagcacgtgctggaatgcctgatactccccgtgcagatcactgacgaaatgttcggttcctttcggcaggttcagtatcgctttcagattaatgatttccgtgaccactttttcttcacaatcatatttttgtgcgagcagatctaaatatttggtttccaatctcgtccatcccctttttatttacgagccattgtatggtaaggtgaatttaaagtatgacataaagtttacatcattagaccttatatgatagtaccgcaaatcgcctttttgagacaatgaaaacggaaaatacggcgcttcaggcatcgaaaattggaccgggataacgccgtgagctcatccccctattgacaatgaattcaacttccattaaaataaaaagttagctgataggtatttctatcagaaactcaatacgtagcaggctatgattgctgtgggtcgcactacagcaggagcggcttctggagagaccgcgggttttccgcggcgccgaagggttcacaatctcaggcaaaaggacagaagagtaccgaatatgtatttgtcatgctgttgattgtcagcggcgcagatataatttgatattcttatgaccatgagattggagggcatccaatctctttttttattggctttttttgctcgtcgttcactagagaggtaaggaggagtcagatgtggagcagcgagagctaaagagggacttatcgaatcggcacgtgcagctgatcgccattggcggcacgatcggcaccggattgtttttagggtctggtaaggcgattcagctggcgggtccttctatcatctttgcgtattttattgtaggtattgcgctttttttcgtcatgcgggcgctgggagaactgctgttatctaaagcgggctaccaatcattaacggatattgccgaggcgtacttagggccgcgtgcagcatttgtcaccggctggacctattggttttgctggattatgacggctatggcggatgtgatcgccgtcggtgtgtatgtgaaatattggtttgatattccgcagtggattccggcacttatctgtttgctcattttattagggcttaatctgttaacggttaagatttttggagaattggagttttggttcgccttaattaaggtagtcacgattctcgcgttaattgtcatcggggtggttctgctggtgattgggttcaaaacgcataccggaacggtttcagcggcgaatctgtgggatcacggcggtttgtttccgaacggattttcaggctttttgctttcgttccagatggtgatcttcgcctatgtcggtgtggaattagtgggtgtgtcggcggcggaaacgtcaaatccgaaaaaaaatattccgtccgctatcaataaaattccgttacggattttatttttctacgtcggggcattgctcattcttttatgtattaacccgtggatgcagctgaatgcggcggaaagtccttttgtgaagaccttcagtctggtcggcatcccgttagccgcgggaatcattaattttgtcgtattaacgtctgccgcttctgcttgtaacagcgggatgttttcaacaagccggattttgtataacttaagcaaaacgaaacaggcgcctgcaagttttgcgaagctgaataaaaatcatgtgccgagccgcgcattatggatatcggttattgtgctgtcagctggcgctcttttaagcaaattgataccggaagcggcctttggcatcgtgacaaccatcagcgcgatttgtttcatttgggtgtggggcgtgattcttgtctgtcatatcagatacaggaaaacccgtccggacttacacgcaagctcgtctttcaaggcgccgtttgcaccgtttatcaattacgccgtgctggcgctgtttgccgccattctggtgattatgctgtttgcggatgcgacgcgcccggctttgctgctgacgccgctgtggtttattggattatttcttatctatcgggcgagagggagaaagacagattgaattgcttcagacggtgtactgccatgcagtacgccgttttaatataaaaaagcgctatcctgccttgtaagcaggatagcgctttttacattaattccggatcaaataatcaaatgcgcctaaagcggcagttgcacctgatcccatggagataatgatttggttgtacgggccgtctgtgcagtcccctgcggcaaataggccgggaacgcttgtcgcgccgcttttatcgacgatgatttcgccgatgcggttgcgttcgaccgtttcgtctaaccattctgtattaggcacgagaccgatttggacgaatacaccttgaagttcaacgtgtttttcttcgcctgtttcacggtcaacgaacgtaatgccgtttacgttttgatcgcctgtgatttctttcgtttgtgcatttttgtgcacagtgacgtttggcaggctgtagagacgtttttgcaggacttcgtctgctttcagttcaggcgcgaattccagcacagtcacgtgattgacgatacctgctaggtcaatcgccgcttcgattccggagtttccgccgccgataacggctacgtctttgccttcaaacaatggtccgtcacagtgcgggcagtaagcgacacctttgtttttgaactcttgctcaccaggtacgttgacattgcgccagcgggcacctgttgaaaggatcactgttttacttttcagtacagcgccgttttcaagttcaagttcgaagaggtcttttttctcaaggcgtttcgcacgctgaaggttcatgacgtcaatatcataatctttcacgtgctcttcaaggcttgcagcgagcttcggtccttcagtcgctttgacgctgatgaagttttcgatgctcatggtgtcgagtacctggccgccgaagcgttcagcgacgacaccggtgcggatgcctttacgcgccgtgtagatcgccgcgcttgcgccggcaggtccgccgccgacaacaagaacgtcaaacggctctttgtcggcaaactcagacgcatctgcgccgctgcccatttttgcgagaatctcttcgatggtcatacggccgcttccgaaagattcaccgtttaagaaaacagtcggaacagccatgatgtttttgctttctacttcttctttgaatgccgcgccgtcaatcattgtatgagtgatattcgggttgagcacgctcatcatgtttaatgcttggacgacatcagggcagttgtggcacgtcaggctgatataagactcgaagcggtattctccgctgatgttcttaatctggtcaatgaccttttgatcagccttaggcgctctgccgctgacttgaagcaatgccagcactaatgatgtaaattcgtggccgagaggaacaccggcgaatgtaacgcctgtgtcttctccggtacgattaacgctgaagctcggtgttctgtttaattcagttttttcaactgaaattttagatgacatggaagccagctcgtcaacgagagccagcatgtccttagaagtgtcatcgtcaccggcgcttactttgagaacaatgtcgttctcaattagctgcatgtattgatttaattgtgctttgatatttgcatcaagtaccaatggaatgcactccttagattttacctaccaaatcaaggctaggtgtaagtgtttcgccgccttcttcccatttagccgggcagacttcacctgggttttgacgaacatattgagctgcttttactttgtttacaaggttgcttgcgtcacggccgataccgcctgcattgatttcaactgtttggatgacgccatcaggatcgatgatgaatgttccgcggtcggcaagaccagtttcttcgtcaagaacgtcgaagttgcgggagatcgtttgagatgggtcaccgatcattgcgtaagtgattttgccgattttttcagagctgtcatgccagcctttgtgtacgaagtgagtatctgtagaaacagagtatacttcaacacctaattctttcagtgcagcgtattgtccttgaagatcttcaagttcagtcgggcaaacgaaagagaaatccgctgggtagaagcagaaaacgctccattgacctttcaaatcttcgtttgttacatcgatgaattcaccgtttttgaaagcttttgcttcgaatggcagtacttcttttccgattaaagacataatatcttcctcctgaaatgtgatttgaaatatattaaaaagacaaagcattcactttatctttcaataataattctaattatatatagattattaaataacatttattttttgtcaagctatatggggtattattttctgcttttttttgctttagacgttcaaaaacacctggtataagcggtttggcgctgtttgtcatgtttagcgccgggcgggagggggattctcaattggtgcattgaaacagtaggaatcaacccttctatatggcagtataaaccaaagggggtatgatcatgcaaataaataacattactttgtacagttgtgcgttggaggagacgaaacacttctatggacgggtgttaggttttcctttaattgatgagtccggtgattcgtttaccatcaaggcgggagaaagtgagttggaattcaggcgcgccgattctcactctcatccgacgtatcatttcgcgtttaacattccgaataatcgttttgatgaggcgaaggcgtggataaaggataaagtcgtttttcaaacggaagatggggaggatgaggtgtatttctctcatattcaggcgcgttccttttatttcaaagatccgtccaacaatctggcggaattcatcgcgagagaaacatcgccgccaagcgcggaacgtttttcgattgagtccgttctgaatatcggcgaggtgaatctgacggctgccgaggtcgtatcaaccgggagggagctgcagcgtttcggcattccggtgagaaagcatgcgccccttagggaagacgggtttcattttatgggtgattacaatgatggggcgtttttgcttttagggccgagcggccgccgctggattttttctgatcagcatgcggagttccatccgctgtctgtcattgtgaacgggacggtccgcattgaggctgacggaaagggcggcattgacatcaggcgggcacagccgtcataaaaaagcccgggctcaaaaggcccggacttgaggtcattatttatagacaacacgggtgctgcacatgatgtcgtgcagcgtttttttctcaccgaaggcgcccatgatgaatccgatataaagaatgagcttagatatgatatatgcgaaagcgcgtccgaaggcctggccgatggaaatccgtccgccatcttcattgacgaccttaaggccgagcaatgcttttcccagggtcccctgcatctttgaggccgtgagcaggctgaaatataagatactgatcacaaaagagctcacaagaatcgggatgacgccgaacaccagaaaagagatgttaaactgattttcggtcatgaaggggtcagccgccgcaacgcctgccgcaaataaaaaagagaccataaattgaatgataaaaatcggaattcctatgatgatttgatcaatgacgtaagccagaaaccgaatccaaaatcctgccggtctttccatgtatctttttctctcccttgctttaatctggaatattatacgtaatcattccggattttgcaacggagcttaagtttcggcgagcagcctcttcccccatgccaagcgtcccatgatcagcccgaaagccagaagggcaaacgtgatgccgcaccacatcagctgatggattcccaaatgtgaaataaaccagccgcccgccgccgttccgatggtgatgccgaggttggaaaaagagacaaacaggctgttgccgaattcgggggcctcctttgcttccgcagtaagccatgtctggctgacaatgagaccgccggaatgaacggcgccccatacgaagacgaggacggccatcggcgcgaaagacgtcccaaacccgtatatgagcaagtaggcggctgtataaagaagcggaaacaggatgacggtctttttcatatttttatataacaaagcaccgaagacgaaattcccggctatcataatcactccgaagcccatcagcatgaagctgacccatgtaccattcatatgggacacccgtccgaggtactctgcaaaatagctgtagacagaaaacatggccgcaaagagacaggtgacggcagcgatattgagccacaaagccggtttgcggaggatgccgagctggcttctgaaagacatgttttctgtgaccggcatggatggcaaaaagagaagaatgcccgtgaacgcgatgatactgatgatagcgccgaataagaaggcggcttcaagggagagacgatccgccagataagacgtgaaaggcacgccgaacgcaaagccggcggtgatgcctgaaaagactttcgttacggcttttccggattggccggcggggacaagccgggccgcggccgcaagcgctacagaaaagaacaccgggtggcataaagccggaatgatccgaaacgccagcatgacactgaaatgcgccgtatacgcgtagaccgcatttgaaacggcaaacatcagcaccgccaaaagcagaatgtatttccggtttatgcctgaagcaagcaaggtcaaaaacggtcccgacacagcgacgatgaacgcgaaaatactgacaagccaccccgcttttgaagcagaaatatgaaatctgtccgccacttgcggaagaacgccgataatgcccatttcggtcgtgataattccgaaaacccctaatgccaaaaacagaatgaagatggaactgctttttttcattgttatgtatgcctccttttataactacatatacagaaaaatagatatgttagaacaaaaaaagccctcctttcatggttatagctggtgctgaacatagtcagcaaaggctttaatttgtttttcattccttctgtaataggtccattttccgattcgttcggattccagcaggccggctttttgcatcgtcagcaggtagctggagatgacggactgcgcaagccccgactttgcctgaatatcaccgacgcaaatgccggtatggaaactgagtccctgatcaagataaggtctttcatcaaaatggtcctccgggtgtttaagccacgtcataatatcacttcgtgttttgttagataacgctttatgaatcaatatcggttccataacgtttattatatctatttttctggatttgtaaattcgtttttaacaaaacattctcaaattaagtaaaaatcgtgctaaaatataacatattatcagattaccggtaaaaaagccgggttattgtcaggaggatattcacatgaatcaaaagaaaaaaggtgcggttgcggtgaccttgctttccgctctgctgttttgtttattgccggtcctcgtctcgctttctccgcttgcggaaacggggccgaacgcgaatcgttttaattccgcgggcatgtgggccgccgtcggccagatccttgtgatatatgcggtcccgctcattttgtatattctcggtattcgtgtcatgaaaatcatcatggccgttttttgcggaatcgggcttatcatttgcgcggctgtcttgttggtggcgttattgaccgcaatttccttagggcaggagctgtctctttattacggccttttaatttggtcaggcgcggcttttatcgtcaatgtggtgtggtatattgccgcgtttcgaccatccccgaagcatcagcaggctatgtgacatttgttctataaatctaccgaaaatacaaatatttcataggttaattatggtatgatcatagtgatatagcagcttttaatagaaacgggaggaactgacattgaaaaaaaagacagcttcattgcgagtgaaaacattggcggccggcgctgcggttgctgcggctttatctgtgggagcggttactgatctgccgggggcaaaatggctgcatccggcggctgctcaagccgcggaaacggtatttaaacaaaatcatgcggcatccggtttcttggcgggacggtatgacgcgcaggcgatgtctccgacgatgttcaactggtcaagagaaagccggtttacaagcactgccgatggcgcattaaaatgggaaaagaatgttccggccaatcctcaaaacggtgcgggagccgcggttgatggggacggcaccgtgtttattcaatcaaaagacgggaagctgacggcgtatcatccggacggtactgtgaaatgggtgacggaaaacctcgggacgacctatacgctgactccggtgctcggaacaaacggtgtcatttatcttccgtctcacgataaaaaactatatttcatcgacaaagaaacaggcaacattttaacatcggttccgttgagcggagcgcctagttccgatgcggctatcggctctgacggcacgctgtatgtgtcgacgctggataactatatctatgcgattaaaccgacgtcgccttcgacatggacgcaaaagtggaagtttaaaacaaacggcgtggtcggctccgctcccgtgttagcgtcaaacggcacgctgtatacggcaacgtacaataatatcttttacgcgatcaattccggaacgggccaagtgaaatggtcaaaaacgacgtccaacgggtttaaaggttatccggttattgatagagacggcaccgtttacgccggaaaccaggacggcaacttatacgcctatacatcaacgggtgctgtaaagtggacgttcccgttaaacggtttctccagctcttcattagcgatcgaccataacggcaatgtgtatatcggttccggaagcggcgagctgttttccatcagcaaaaccggcaatatgaactggtctttctatacggacgggcctgtgagaacggcgccgctgattgatgcggacggcaatgtgtacttcggttctgacgataaaaacgtctatgcggttgacgctgacggcaatgaaaaatggcgctatcaaacagacagcaatgtcatttcctccccggttctggctgaagacggcacgctctatgtcggcacttatacgaaactgctcgcattcggggcaaaataatataaaaaaagaatccgcgtcatctgcgcggattcttttttatttagaggcttgaataaatacgcctttttcatgagagaattctttaaagccgtacacaccgtgatatgaaccgatcccgctcgtattgacaccgccgaacggaaggttgacgtcagtgaaatgaacgacgacatcattgacagaagcattgccggacgtcgtatgctgcagcacataatcgatcagctcctgattatggctgaatacatacaaggcaagcggcttgtcccgttcagtgatgtaatcaacggcttcactgatatcttcgtaattcataatcggcagaatcggtgcgaagatttcttcctgcatgatcttcatatcaggcgtgacgtttgtcagcacggtcggagaaatcgtgcggtcatgcgcatcgaatacgccgccgaacgccgttttcgcccctttttcaatggcatcatcatacagggctttgacacggttaaagttgcggtcgttgacaatctgcgtgaatttattgcggtcaaccgtatgatcatcctccataaaacctgcattgacaatggtttgcaggagatctgtaaaggtgctctgcacttctttcttcataaggagatagtcaggtgcgatacatgtttgtcccgcattgacaaattttccgacggcgatttttttcgccgcgtccatcaaatcatagccgctgtcgatgatcgtcgggctttttccgccaagctcaagcgtgacggacgacaagtgcttcgccgctgccgtcatgacgattttaccgacattcgtgcttccggtgaagaaaatgtggtcaaacggctggtcgagcagttctgtggcgacatcgacctcaccttcaaaaatggcgacttcttcttcgtgaaatgcctcgcgaataactgtcgcggcgatatggctcgtctccatcgtgaaatcagacagcttcacaatcgcgctgttgccggccgcaatggcagccgcaagcggagccatcgtcagcataaacggataattccatgggccgagaattaaggtgacgccttttggctcatacattaatacgccgtcagcgtcggggctgacggatgagccgacgcgtttcggcgccatccaggtgtcgagattgttcatattatctttaatcgccttgatcgttccctgcgtttccgctcttttcacctcatgataaggcttgcggacgtcccgtctgatcgcctcgatgatttcttcttcatgtgcagtgacggcatctaaaaagcgctgaagcttttctctgcgctgcccggctgttgaagcacgcagcgttttttgattttttttctgaagctcaaagacgcgtttgatgtctgcttttatatgctgatccatcggtcttcctcctctggttgcttttttgtttcttcagggcctattataatgtgatgtgtttttgcggcaaagacagcgtaaacacatctatacgttaccgtacaaattgcggtgatctgtctaatgaaaggagtgtctcttatgccggattctgtgacaactgacatcaaacaagcgcttttggccatgcttggagagcgggatatccgccgtgtgaccatgaaggacatcgccggacggtcgcatgtgagccgggggacactgtacctttattacgaggataaatatgcgattttagaagatataacggaagaaatgaaagacgggctgagcgaagcgctttatgattcgctgaagaataaagatgtgcttcatttacatggcggatggcaaaaagtgcatccgaccctgtcttttgttgaccggcatcgggagttttttcaaacgatgatggaccgtcataaaatgccgtattttcactttcatgcttttttaaaagatgtgttccggcatgatgtgctgctgtcaccggtcaatgcggatttctcaacgactgaacaggatatgtacattcattaccgcgctttatacacgtatgccattgtgttgtactggctgaatgaggagcccggggcatccccggaagcgatcagcggacaggtgtgggatttaatttctcaaaaacggttttactggctgtttggccgccgggtgccggaacaagaagaaaaaaagcccgccgaccgccgggtgacccggacgaggcaggccttgcaagaagccatgatcggcttaatggcggaaaaaaaagagtacgcggcgattacgatttccgatattgcccgtcaaagcaacctccgccgtgccactttttatgaccattacgccaacaaagaagcattgctgaaaacgatcatccatcaatcatgccgggatctgatcggattattgacggtaaaaggagagccagccgattgctccatggaagaagcggaagccgcgctcgtccgtctcttttcggcactgtcggacggcatgccgctcgtccattttttgagagaggggtccggagtgcctgacgtcatcccggaaatgttcagagcgctgcaatcgttttatcttcatcagcccctgcacattcaggcggggaaaaagctctatgcatactatgtcgcgtccatgctcgtcggtttgattcaatatcgtcttcatgaaggaaaagaccacgcgccggacatgctggcccgggagtttctgcagtttttggatgtaaagaagtatcgggtgattttgctgtgaggatgatgaaaaagaactcggccgaaaacaggccgggttcttttttgctgttttcttcgagaagtgccgatatgaagtgtccggctttatcccttaaaaaagataccttccatatgccgcctgatcagcattctgccgccaaacatgacaaatgtcatattcggggcatgatggctgctactacaaaagcgtctggcgcctcggtatacttggaatcataataaaaaaaaggggatatgacattcatgaccaatcacaccgcaactcaaaaacaagcatctttaaaaaagcaggttgctgcattttccggtgccgatacaaagcatagtgtcaatcagcttttcaacacgtttgtgccgttttttgccctttggtttcttgcttacttcagcctcaatgtctcctatcttctgaccctcgcctttactgttatagcagcgggatttttgacaagaatctttattattttccacgactgctgccaccaatcctttttcaaacaaaagaaactgaaccggctgttcgggtttatttcaggtgtgctgacactgtttccgttccttcaatggcagcgcagccactccattcatcatgcgacaagcagcaacttagataaacggggcaccggcgatatttggatgatgaccgtcaaggaatacaacgaagcgtcagcctggacaaaagtacgctacagactttatcgcaatccgtttattatgtttattctcggcccgatttacgtatttctgattcaaaaccgttttaatgtaaaaggcgcccgccgcaaggagcgctggaacacctatttcacaaacgcggcgattgtcttattagctgctgcgacgtgcctgcttttcggctgggaaaactttttgcttgttcagggtccgattttccttatttcggggtcaatcggcgtctggctcttttatgttcagcacacgtttgaggattcttattttgaagcagatgagcattgggactatgtgcaggccgcggtagaaggaagctccttttacaagcttccgaagcttttgcaatggctgacgggcaatatcggctaccatcatgtccaccacttaagcccgaaagtgccgaactacaagctggaagccgctcatgaggggcacgagcctttaaaaaacgtaccgaccattacgcttaaaacaagtcttgaatccatgaaattccgtctgtgggatgaggacgaaaagcaatttgtcacctttcgggaggcgcggaaaaaaccggcgccccatccggtgtcgaaggaacctttaaagaaaaatgcctgatatgacgtgcggctctttctcttatcagaaagagccttctcttcatgcgtgaggatgcaatgaaggcggtgttttgataaagtgatggtagacacaagcagcagaaggtggaacaaagatgaagaagtattttaaatttcaaaaactgaatgggatttctccttatatatggatgatttttttcatcttgcctttttattttatttttaaaagctcttctacctttgtcatcgtggccggcatcattttcacacttgttttctttggcgcataccgctttgcatttgttgcaaaaggctggccgctttacttatgggcgcttcttctgatcggcatttcgaccggctcagccatgctgttcagttatatttatttcgccttctttatcgcctacttcatcggccatatccgagacaaagttccattttacatcttatattacattcatatcattagtgcggcggttgccgtcaacttcagccttgttctgaaaaaagagtggtttttgacacaaataccgtttatcgtcattacactgatcagtgccatcctgctcccgctcagcattcgaagcagaaaggcacgggagcgccttgaggagaaattagaatatgcaaatgagcgaatcgccgatcttgtgaagctggaagaaaggcagcgcatcgcccgggaccttcacgatacacttggacaaaagctctccttaatcggactgaaaagcgaccttgcccgaaagctgatccacaaggaccccgaacaggcccgcactgagctgaaaagcgtgcagcagacggcccgaacctccttaaatgaggtcagaaaaatcgtctcatcgatgaaaggcatccgattgaaggatgagctcggcaatgttcggcaaattcttgaagcggcaggaattgaatttgtgtatgaagaaaaagaagcgccaaaacatatctctctgctgaacgaaaacatcgtcagcatgtgcataaaagaagccgtcaccaatgtcgtgaagcacagcggcgccaaagtatgccgcatcaccattcagcagctttggaaagaggttgtcattacggtggaagatgacggcagctttcaatgcaaagaagaccgctttttttcaaaggggcacggcctgcttggaatgagggaacgtcttgaattcgcaaacggcagtttagccatcgatacagccgccggaacaaagctgaccatgagaatcccgaatgattcaaaatcaaaagaaaaggatggtagcagatgatcaacatcttcattgccgaggatcagcaaatgctgctcggcgcactcggttcactgttgaatttagaagaggatatgacggttgtcggccaaggcacaagcggccaggatgccatcgatttcgtggaaaaacatgcgcccgacatttgtctgatggatatcgaaatgcccgggaaatcaggtcttgaagcggcagaagagctcaaggacagcggtgtgaaaatcatcattttgacgacctttgcccgctccggctattttcagcgggcgctaaaagcaggcgtcagcgggtacatgctcaaggacagcccgagcgatgagctcgtcagcgccatccgcagcgtcatgaaaggaagacgcgtctacgcacctgaattaatggaggacatctatagtgaagaaaacccgctgaccgaacgggaaaaagaggtgctcgagcttgtggcagacggaaaaaacacgaaagaaatcgcaaacgccctcagcattaaaagcggcacagtccgcaattacgtttcgatgatccttgataaattagaagtgaaaaatcgaattgaagccattacccgatcaaaggaaaagggctggtttaagtaacccgccctcagcttgttcagccagtgtttttgcactggcttgtttctttttcaccgtcactccgtctcttccttccacttcttatcaatcagcatttttcccggccaagtgtatgccatgatgccgccgtctgcggtgatgtcttctcccgtgacgtaagagctgtcgtctgaagcgaggaagagcgcgacggctgccatttcttccggttttccgagccggccgagcggcgtgatccatttgttggcttcacggaacgcctcgcccatttcgtcttctgtcgtgcctgccaatttatcaatgagcggcgtttcaatcgtccccggcgataaggaattgacgcggattccgcttctggcgtaatcaatggccatcgctctcgtcaggttcgtgattccgccttttgcggcgttatagccggagcggtcaaggtctgcggcgcggccggacatggaggaggtgttgatgatggagcctcctttttcgagcatgagcggaatcaggtatttgctgcacagaaatgtgccgcgcagatcgacggcgatgatccggtcaaacaggtcgaccgggtattcatggacttttccgccctcttggtcaacaccggcattgttaaacagaatatcaattgttccgtactttcgctgaatgccgtccgcaaaagactttacgttttcttcgtctgatacatcaaggtgaaaggcttctgcttctccgccgttttttctgatggcgctgacggtttcattcagttcgctttcattgatgtcaccgcagatcacgcgggcgccttcatcggcgaaaacccgtgccgtcgcttgtccgatgcctgtcgcggcccctgtgatgattgcggttttgtctgttaatcttcccatattgcgattcctcctttttttatatctgttcccgctgaatagggggataaacatatggaggtctatttctaaatacctattaaatatgttaatattatgtatatacaccattgggaggtttacatattttgaagatacagcataagaaggagatagcgttttattgttatgccattgttcctatgggatttgcgatttacaccgttatctctattctatttcaggacatcatatttcctctcactgtaagaaatgttttgcatgagtctttgcgaaacttaggttctcttatcttatttagtttgtttttctacccgtcatacatatggatgaagaaggaattcggccgccggaaagaagcagagaggagaggatgatcaacattctctcttttttattgataaaatgggtgaaatgaatccattaacatgttaaatttacaatatatgcatctgctaatcctagttgacaattgtcactgtatatgataaatagatgctgaaaagattttacataacatcaaagcataattaaaggagagatctgaagtgcggaaaaaaaagtttaaagcagaatccaagcgattgctggacatgatgattaactccatttacacgcagaaggaaatttttctccgcgagttaatttccaacgcgagcgatgcgattgacaaaatctattacaaggcgttaaccgatgattcattaacgtttgatcaagacaattactacataaaagtgacggcggacaaagaagcgagaacgctcaccgtcacagataccggtatcgggatgacaaaagacgagcttgaacagcatctcggcacgattgcgaaaagcggttcactcgctttcaagcaagaaaatgactcgaaagacggccatgacattatcggccagttcggcgtcggattttatgcggcgtttatggtggctgataaagtcacggtgaaaagtaaggcgctcggcagtgacgaggcgtatgtatgggagtcggaaggggctgccggctacacgatcgcgccgtgtgacaaggaaaccgtcggtacggaaatcaccttgaaaataaaagaaaacacagaagatgaaagctatgatgagtttttagaaaactaccgcatcaaagcgatcgtgaaaaagtactctgattttatccgctacccgatcaaaatggaagagacggtcaacaagccgaaagagggcagcgagaacgaatttgaagaagttcaggaagaacagacggtcaacagcatggtgccgatctggagaaaaaataaaagcgagctgacggatgaggattacgaggctttttacgccgagaagcattacggttttgataaaccgctgacccatgtgcatatcagcgtcgatggagcggtgcgctacaattcgattttgtttattccggaaaacatgccgtttgactattatacgaaggaattcgaaaaaggattggagctgtattccaacggcgtgctgatcatgaacaaatgcgccgacctgcttccggaccatttcagctttgtaaaaggcatggtggattctgaggatctgtcgctgaacatttccagagagatgctgcagcacgaccgccagctgaagctgattgcgaaaaacatcaataaaaaaatcaaagcagagctgaagagcctgctgaagaacaaaagggaaaaatacgaatctttctatgaatctttcggcagacagctgaaattcggcgtctataatgatttcggcgcgaataaagacgtattaaaagatctgcttctcttctattcatctaaggagaaaaagctcgtcactctggacgaatatgtgtccagaatgcctgaggatcaaaaatatatctattacgcgtccggtgattcatatgagcggattgaaaagctgccgcaaactgaaatggtggcggacaaaggctacgagattttatatttcacggaagatattgatgaattcgcgatcaaaatgctgacaagctatgaggaaaaagagttcaaatccgtatccagcgccgacttaggcatcgacagtgatgaggatgaaaagcagactgaagccgaagagaacgaatataaagacctgttcgaaagcatgaaagagattcttgcggataaagtcaagaacgtcagagcatcgaaacgtttaaaatcccatccggtatgctttgcgacagacggcgaagtgacgatcgaaatggagaaagtgttaaacgccatgcctgacagccagcaggtcaaagcggaaaaagtgctggaaatcaacccgaatcacgaagtgtttgagacgttaaagaacgcgcacggacaagatcgggaaaagctggcattatacacaaacctgctgtacaatcaggcgcttctgattgaagggctgccgatccatgatccggtcgagtttacgaatgacatctgcaaagtcatggtatgacgctaaaaaggaatcgcccggcgggggcgattcctttttttattacagtgtgcgctgtttaagaatttgattttgtttgctgcgcttctttaaggagaaccgttttttcaagtgcgtttcgatttcttctaaacttctgcccttcgtttcaggaacgatgtaagcggcgaagaagaaggatgagaggcaaatgactgagaatattccgaatacccagccgatgcccatggcgctcagcataagcgggaataccagtgaaacgatcaggttggttgccgacagaatcaatgttgtaaatccggttgcggctccgcgtgcgtttgacgggaacagctccggcatcagaacccatacgacgggaccccatgtcgcctggtagaaaacgatatagatgccgagaaacagcacggtcagccatgccgttgaagctgacaggccggccagaaggagaatggctgatagtgacgccaggctcaaggtaatgccgacacttccccacatcagcagttttttccggccgatccggtcaattaagatcatggcggtgatacacatgatgacgtttaagacaccgatgcccatcgtgccgagaacggacgccgaagtgccgagtccggcctttgtaaagatggtcggcgcatagtaaatcaccgtgttgataccgaccgcctgctggaagatggcgaggccgatcccgatcagcagcatagggcggatccatttggctttcagcaagccgagtgtagattcttttttctcggcttcaccttgtttcatttccgccaattcaacggcgatatcctctttgtcgtgagtcatttccatgacttgtctggcttccttctcacggccgcgtttgacgagccatctcggagattccggcataaacgcgattccgattaataaaagcgccgccggtactgcggcgagaccgaccatccagcgccaagcttcaaacggggtgaatatgtaattcacaatatatgcgagtaaaattccggttacaatcattaagttattcaatgtgccgagcgttccgcgtatttttgtcggcgccatctcagatagataaacgggaaccagcgccgttgagccgccgacggctaacccgagaatgacacgggagataatcagcatggtgacggtttgcgaagccgcacaggcaagcgcgccgataataaaaatgagtgaaaggacgaaaaccacttttctccggccccatcggtcagagcatgtcccgcttaaggcggacccgaaaatcgcaccgagcagcagcatgctgacgaccaatccctcggtcagcgtgtttaaaggaatatcattgttaataaataacaaagcccctgaaatcacaccggtgtcatagccgtaaagcagcccgcctaatgctccgaaaaagtaaatcaggtattttttagtgtttttcttcacagatgatcctcctcatcttttggaacgcataatagtttatttagataactatttcattccccgaagagaaaaatataaacataaaaaaaacacgccccttttaaaaggcgtgtttttttctttcttaggaaaacagcttgtcgataaacgcgatttcttcagcagatagcgtaatggaggctgctttcatgttgtcttttaattgatccgcgcgtttggcgcccggaatcaggatatcgatttcaggtctcgccaagtaccaggcaagcacgatatgcgccgtatcggcattgtgcttttcggcaatcggtttgagctggttgacttttttgatgttttctttaaactgctccccttggaaatgcgcctggtcattgcgcaggtcgccttcagggaaggttgtgttctcgtcgtatttgccggccagcagtccggatacgagcgggaagtacggaatgaatgagatgccgtgttctgtcgtataagggaagaaagtcttttccgcctcacggttcagcaggttgtattctccttgaatcacgtcgactaagccgtctttattggcttctttcagctgctccaaagagaaattggatacgccgatggaacggatttttccttcttttttcagctcattcaacgcttgaacggcttcgtccttcggcgtgtgctcatccgggaaatggatgtagaataaatcaatgtaatcagtctgcaggcgtttcaggctgtcttcgaccgattgtttcaaaaaggccggtgagttgtcgaaaacaaagtcatcgccttcttttctgtgagcggcttttgtggcgatgaagacatcctcgcggttaaagtctttcagcacctcgccgattaattcttcagaacggcccacaccgtaaatataggcggtatctaacatggtaacgccgcttttaatcgcttcccggaccaattcttttcccgtttcttcattcagattcggatagagattgtgtccgccgaccgcatttgttcccaaaccgatcggaaatacctttaggtcagttttgccgattgttactttgctcatgttttcgccccctgaaaaaattggatatcatagcgactgccggaaaaatacggcagcgttctctattaactataacgctatgccaagtgaatgtcgatttgatgctcttggcaatacttcgtatattcctcatcgagctgctgagaagtgacaatgctgtgaagccggtcgaaaggcgcgtatgtcaaaagcgtggatttgccgaatttggaatgatccgcgagcagatacacttcgttcgccttttcggaaattctctttttcacctcgtattccagtaagtcggaattcgtcaggccgtgggtgatcgttgtcccggtagcggacatgaacgccttgttaatgttgtatttattgagtgtgctcggatcatcaatgccgacaaacgaccttgtcttccgtttgtagttattgccgatgatgatcaggtcgatatttttcatggatgaagccgcgttaataatatcaaggctgttcgtcaaaaccgttacattcttatcgggatcaagcgtctccagcatcgatttggtcgtcgtgccggaatcaataaacacaagatcgtgatcctcgataaatcgtgacgcatagcgggcgattttgattttttcatcctgatgctgaatggtgcggttttcaaaagggacgagcacagatttttcggctgacgtcacgccgccgtacacctttttgataacccctttttccgcaagcttattaatatcgcgtctgaccgtgtttttagagacgttgaacacctcgcacagctcatccagcgaagtggctccgtgtttgagaatgtattcttccatctcctgaatccgcatcagtttcataaaaaaactccttctagaattcttaaagtaattaaaatatataataaacaccagaagttaatcaatagttacttaacaaatgataaaaaagagggttcacaccgtacgattcgacacggttctccaagttcatgttttcccgttcaaaaaaagtatgataaaaaaataatgaaaaaattttgattttttagattgacttgaagaggtgttgggcttacaatgtaaccaagaaatgaccaaaatataacctgtaaaatcaaaagttaaagatgtaaccgtttgcttttttccgtcacatgatcaacttttacatggaaagattgggagtcaccatcattttagcatttgtaagcgtttaattcatgtcttttatatgcaaaagatgaatatattcatccattattacccagctgaacaggatgtttactatttaaggaggcaatgagaatggcagagatcagaaaactgaaaaactacatcaatggtgaatgggttgaaagtaagacagatcaatatgaagacgttgtcaatccggctacaaaagaagtgatgtgccaggttccgatttctacgcgggaggatgtggaatacgccgtccgctcagcgtcagaggcgtttcaaacatggtcaaagacggcagtgccgcgccgtgcgagaattctatttaactatcagcagcttctccagcagaacaaagaagagcttgcccgtctgatcactttggaaaacggtaaaaacacgacggaagcactcggtgaagtgggacgcggaattgaaaacgtcgaattcgcagcgggcgcgccgtcactcatgatgggcgattcactcgcctccatcgcgacggatgtagaggcagcgaactaccgctatccgatcggggtggtcggcggtatcgcaccgttcaacttcccgatgatggttccctgctggatgttcccgatggcgatttcattaggaaacacttttattctgaagccgtctgagcgcacgccgctgttaacggaaaaactggcagagctgtttgaacaggccggtctgccgaagggcgtcttcaatgtcgtgcacggcgcgcatgacgtcgtaaacggcgttcttgaacatccggagattaaagccatctcattcgtcggttcaaaacctgtcggcgagtatgttttcaaaaaaggcagcgaacatttgaaacgcgtgcaagcgttaacgggcgcgaaaaaccatacgatcgtgttaaatgacgcccaccttgaagatacggtgacaaacattatcggtgcggcattcggttcggcaggagagcgctgcatggcatgcgcggttgtgacggttgaagagggaatcgccgatgagtttatggcgaaattacaggaaaaagcagcggacatcaagatcggaaacggactggatgacggcgtgttcttaggcccggtcatccgcgaggacaacaaaaaacgcacgcacagctatattgaaaaaggcatcgaagaaggagcgagacttctttgtgacgggcgtgaaaacgcaacggaagacggctatttcgtcggaccgacaatttttgacaacgtgacgacggatatgacgatctggaaagatgaaatctttgcgcccgttctgtcggtcatccgcgtgaaaaacttaaaagaagcggtggacatcgccaaccagtctgaatttgcgaacggcgcgtgtctgttcacttcaaatgcgaacgcgatccgctacttccgtgagaatattgacgcgggaatgctcggcatcaaccttggcgtgccggcgccgatggcattcttcccgttctctggctggaagtcttctttcttcggcacattgcacgcaaacggaaaagacagcgtcgacttctatacacgtaaaaaagtcgtgacggcacgatacccgtctcctgacttcaattgatctgacagccggcctggacggctttgtgattccgtccgggttttcttttaccatcaattaaggaggaataaacatgagtcatttgctgcgcaaaccgcaggccgatgagatttctcaaggcgtgaacatcatacatgacgtcacttcagccaattcagacctcaaatacgtcggatttaaagtcgttgacctcactcccggttccacatatacagaagatttgaaaaagacggagtgctgcatcgttgcggtaacgggaaaaatcaccgtcactgatcatgatcagacatttgaaagcatcggcacccgtgaaagtgtatttgaaagaaaaccgacggacagcgtttatgtgtccaatgaccgctcttttggaatcacagcggtcagcggggcgagggtcgcgctgtgctattctccgtccgaacaccagcttccgacaaagctgattaaagcggaagacaacggtgtggaacatcgcggcaagctggcaaacaaacgaaccgttcataatattctccccgattcagatccatcggcaaacagccttctcgttgttgaagtttacacggacagcggcaactggtcgagctacccgcctcataaacatgaccaagacaatctgccggctgaatcctttttagaagaaacctattaccatgaaacggacccgccgcaggggtttgtcttccagcgtgtgtacacggacgaccgctcgattgacgagacgatgaccgcagaaaatgaaaacgttgtcatcgtcccggcgggctatcacccggttggtgttccggacgggtatacctcttactacctgaatgtaatggcgggaccgacacgaaaatggaagtttcataatgatccagcccatgaatggatcctgaaacgctaaccagtgaggagtggcagataacgatgaaatatacgtttaatgaagaaaaagagtttgatattgtcgcgatcggacgcgcgtgtattgatttgaacgcggcggaatacaaccggccgatggaagaaacgatgacgttttctaaatatgtcggcggttccccggcaaatattgcgatcggcagcgccaagctcggattaaaagccggtttcatcggcaaaattccggatgaccagcacggcagattcatcgtttcctatatgcaagaaaagggcgttgatacgtcacaaatgaccgttgacagagaagggcgcaaagccgggctcgcttttacggaaattctcagtcccgaagagtgcagcattctgatgtaccgggatgacgtggcggatttgtatcttgagccgtccgaagtcaatgaaggctacatcgcaaacgcgaaaatgctgctcgtatcaggtacggcgcttgcgaaaagcccgtcgcgcgaagccgtcttaaaagcggtgcatatcgcaaaaaaacatgacgtaaaagtcgtgtttgagctcgactaccgtccgtatacatggcaatcggcagaagaaacagccgtgtactacacgctggtggcggaacaatccgatatcgtcatcggtacgcgtgacgaatttgacgtaatggaaaaccgcagcggcggagataacgatgaaaccgtccgccatttgtttgcgcactccgctgaccttgtcgtcattaagcacggcgttgacggatcatacgcatacagcagatcgggagaagttttccgggcgcatgcctataaaacaaaggtgctgaagaccttcggagcgggtgattcctatgcgtcagccttcatctacggacttgtcagcggccgggatattgaaacggctttaaaatacgggagcgcttccgcttccatcgtcgtcagcagacacagctcctcagaagcaatgccggctgccggtgaaatcatcgaactgattgaagcgcagcacagtcttaacggtaaatagaacgtataaaaggtgggatcgtttgtgggtaagacaattcgcttaacgacagcacaagcgctgattaaattcttgaaccggcagtacattcatgttgacggaaaagaagacccgttcgttgagggcatcttcacgattttcggccatggaaatgtgttggggatcgggcaggcgcttgagcaggacgccgggcacctgaaagtctatcaaggcaaaaacgaacaaggcatggcgcatgccgcgatggcatacagcaagcagatgctgagaagaaaaatttacgcggtatcgacatcggtcggtccgggtgccgctaacttgacggctgccgcgggtacggcgctggccaatcatattccggtgctgctgcttccggccgatacctttgcgacgaggcagcctgacccggtgcttcagcaggtggagcaggaatacagtgccgccgtcacgacaaacgatgcgttaaagcccgtgtcccgctattgggaccgcattacccgacctgagcagctgatgagcagcttaatccgggcatttgaagtgatgacagatccggcaaaagcgggcccggcgaccatctgcatttctcaggatgtagagggagaagcatttgattttgatgaaagcttctttgaaaaacgcgttcattacattgaccggatgcagccgagcgagcgtgagctgaaaggcgccgcggaaagaattaaggagagcagccgtcccgtcattttagtgggcggaggcgcgaagtactccggcgcgcgtgaggaattaatcgcgctttctgaaacatacggcattccccttgtcgaaacgcaggccggtaagtcaacggttgaagctgatttcgccaacaatctgggcggcatgggcatcacgggcacactcgccgcaaacaaagccgcccgccaggctgatctgatcatcggtgtcggcacacggtacacggactttgcgacatcctcgaaaacggcgtttgattttgacaaagcaaaatttttgaatatcaatgtcagccgcatgcaggcttacaagcttgacgcgtttcaggtcgtagccgatgcgaaagtgacgctcggcaggctgcacggcttattagacggatataaaagtgcattcggcacggcgattaaagaatggaaaaatgaatggctggctgaacgggaccggctcggcaaggtcacttttacacgtgacgcgttcgaaccggaaattaaaaaccatttctcacaggatgtgttaaacgagtatgccgacgcgctcgagactgagctgccgcagacaacggcgctgttaaccatcaatgacacgattcctgaagacagcgtcgtcatcagctcggcggggtctcttccgggagatttgcagcggctgtggcattccaacgtcccgaatacgtaccacctcgagtacggctattcctgcatggggtatgaagtatcaggcacgctcggcctcaagctggctcatcccgacaaagaagtctattctctcgttggtgacggaagcttcctgatgctgcactcagagctgattaccgcgcttcaatataacaaaaaaatcaatgtcctgctctttgacaactcgggattcggctgtatcaacaacctgcagatggatcacgggagcggcagttatttctgcgagttccgcaccgaggataatcagattttaaacgttgattacgcgaaggtggcagagggctacggcgctaaaacatacagagccaatacggttgaagaactgaaagcggcgcttgaagatgcgaaaacgcaagacgtatccactttaattgaaatgaaggttctgccgaaaacgatgacggacggctatgacagctggtggcatgtcggcgtggcggaagtgtcggagcaggaaagcgttcagcgggcatacgaagcgaaagagacgaagctgaagtctgcgaagcagtactagaggggaggcatcacgatgggcaaacaagatattctgtggggcatcgctcccattgggtggcgcaatgacgatatgccggaaatcggagccgggaatacgctgcagcatttgttaagcgatattgttgtcgccggctttcaaggtacggaagtgggagggtttttccctgaaccttccgtcctgaataaggagctggctctccggaacttgcggattgcggggaaatggttcagcagctttatcatacaagacggtattgaaaaaacggctgaacaatttacagaacactgtgattatttgcagaaagtcggagcggatgtcgccaccgtttctgaacagacgtacagtgttcaaggcttggacattgatgtatttaagaaaaaaccgcacttctcagatgaagaatgggatacgctgtgccaaggcttgaaccgtctcgggaaaatcgctgacgaatacgggctggatctcacgtttcatcatcatctcggcacaggcgtccagacggcggaagaagttgaccggctgatggatggaacggacccgcggtatgttcatttactatatgataccggccatgcctatatctcggacggagactatatgacgattctcaacaagcatatggatcggatcagacacgttcatttcaaggatgcgcggtttgacattatggagcggtgcagacaggaaggcaagtcattcaggcagtcgtttttacaaggcatttttacggttcccggagacggatgcatcgattttaccgaagtgtaccgagcgctcgtccgtcatgattattcaggctggatcgtcatcgaagccgaacaagacccggcagtcgccaatccgcttgagtacgcgctgattgcgagaaagtacatcgacagtgaactgcttgatcctgcaaattagagggggacttatatgaatagtgccaaggcggaatcagctttcagcaaaaggaccatcgccgcagcattagcaaattacattgatgcaggttccattgtggcaggatcagcgggtttatctatgtgggtcagctacttgaagctgtccgacagtcagatcggattgctcggcgccttcagcgcaaatgcgatatcagcggccgtcggagcgctgctcggcgggtatttggctgataaggtcggccgaaaagctgtatacacaaacagtatgctcgtctacgccttaggaatttgtttggttttgtttggattcaactttcccatgctgttatgcggatacatgattatcgggatttctgtaggcgcggatattacggcgtcatggaccattatcgcggaaaacgcccctgagaaaaaccgggcgaggcattgcggagtggcgcaggtggcgtgggccgccggagccgttgtggttctgctgttatccgttttggtcggtgacctcgggcttttaggaaataaaattgtctttgcgcatctattggtgatcgccctgatcacatatgtgataagaaagcgtttacctgagtcggatgcctggaaaaacagtgaagagcggcctgccgccgtgaaaaaaacatcttattttgacctgcttcagccgaaatttttcaagaacattttgtttttaatgggtgtgtttctcgtatggaatctcgcagcgggcgtcatgggattcttcatgccgtacatctaccagcaggtcggcggcgtatccgcaaatacggccaacattctgcagatggccctgtttatcttcaccgggctcggcgtcgcctgtatcttcatgccttttgcagatcaatatcggaaaacggtgttcggaatctgcgcatttatggccgttgtcggctggtcgctgtttttactgccgtttcaggggctcccgatgctgcttttgtttgttttagcgatcggcatcaataacggagccggccagcaggcgaactaccagctgtgggcaagcgagctgttcccgacagaatacagagcgtcagcacaagggctcatgttctttctcgtccgtatttcaatcggcatttggagtttatttgtgccggtcatcatgtcacaattcggcatcggttttatggccggtattctgctcatatgtgtgacggccagtatgatcatcgggcttgtcttcgcgccgaatacgtccggcaagtcgcttgaacagatacaggaggaactttacggcgctcctcaggacggcagcgggaaaagaaagacgagaaccattatttgattatcagaaggagtggcgatcaatgaatttacgtataggtgttatcggaaccggtgctatcggaaaagagcacatcaaccgcatcacaaataagctgtccggagcggaaattaccgctgtcacagatgtgaatcaggaggccgcgcagcagaccgttcaggatttcaatttgaacgcctccgtttatcctgatgacgacagcctcctcgctgctgaaaatgtggatgccgtcttagtgacaagctggggcccggctcacgagtccagcgttttgaaagcgattcagcacggcaagcacgtgttttgtgaaaagccgcttgcgacaacggcagaaggctgtatgcgcattgtcgaggaagaaatgaagacgggaaaacgattggtgcaggtaggtttcatgcgcagatatgacagcggttacgttcagctgaaagaagcgattgacaaccgcgtggtcggcgagccgctgatgattcactgtgcgcaccgcaacccgacagtcgcatcgaattattcaacggacatggccgtcgtcgatacgctcgttcatgaaattgatgtcctccactggctcgtcaatgacgactatgaatccgtacaggtcatctatccgaagaaatcaaaacatgcgctgccgcatctgaaagatccgcagatggtcatcatcgaaacaaaaggcggcatcgtcatcaatgccgaaatctacgtgaactgtaaatacggctatgacattcaatgtgagatcgtcggggaagacggcgttatcaagcttccggaaccgtcaagcatcagcttgagaaaagaagggacattcagcaccgatatcttgatggactggcagcgccgatttgtggctgcgtatgatgtggaaattcaagacttcattgattcgatccggaataaaggcgaagtcagcggtccgacggcatgggacggttatattgccgcggtgacaactgacgcgtgcgtaaaagctcaggaatccggccagaaagagccagtggcgcttcaagagaaaccggcattctaccaatcatttacgactgtgaacaaataatagatcgggagtgaaagaaatgaaactggccttagatccatccatgtaccgcgatgatttaactttggaggaaacggtctataaaacggcggaactcggatacgaatatatcgaactgtctccgcgcgaggatttttgtcctttctataaatatccgaaagtcgattcagcaaaaatcaaacaattgaagcgccttttaaaagatacaggtgtgaagctgtcttctcttcttccgctttaccactgggcgggtcctgatgaagaccgccgacaggccgccgtgcgcaactggaaacgggcgatcgaaattgcagttgaacttgaagtggatttgatgaacagtgaattcagcggttcaaagtatgatccgttgacaagtgaagaaaaattcatcaaatccatggatgaactgctgcccgtttttgaaaaagaaggcgttaaactcaatcttcaagctcacccgtttgattttatcgaaacgcacaaaggcgcgatggatatgatccgcgcgcttgacaaggattggatcaatcttgtctactcgactgcgcatacgttcttctatgatgacggaaaaggcgatattgcgaccatgtttgatgaagccggcgaccgccttacacatgttttatttgcagatacttttaatcataaagcggcgcacggtctgcgctacatcgtcaacccgcctgacgcgaaagtaacggttcaccagcatttggacatcgggcaaggcgaggtcgattttgagacgattttcagaaagatgagagagatgaaattcgacggaatcgcgacgaacgccgtttttgcttgggtcggcgaaagagcggatgaatcaagccggaccacgcttaagaaattaaaggaagaactgggtatggcataagctgagtatggagttcggcggagcggggcaaacaagccctccagccggactcccttcatatcgaaaacgcggatgggagaggctgacatgaaactttgctttaatgaagcgactacgctggagaattcaaacctgaaacaggatttagaactgtgcgaaaagcacggctatgattatattgaaatccgcacaatggataagctgccggaatacttaaaagaccattcactggccgatctggcggaatattttcaaacacaccacattaaaccgcttgccctgaacgcactggttttctttaacaaccgtgatgagaagggctatagggagatcatttcagaattcaaaagcatgatggaaacctgcaggacgctcggcgtgaaatatgtggtggccgtgccgcttgtgacagatcggaaaatcttgaaagaagagatcaaaaagagcagcgcagaggtgctgactgagctttcggacatcgcggagccgtacggcgtaaacattgcccttgaatttgtcggccacccgcaatgtacggtcaatacatttgaacaggcgtatgacatcgtgaacgctgtcggccgcgataatgtcggactggtgtttgacagcttccatttccacgcgatgggctccaatattgagagcttgaagcaggcggacggaaagaaaattttcatctatcatatcgacgatacagaagacttcccgatcggctttttaacggatgaagaccgcgtctggcctggacagggtgcgattgacttagacgcccatctgtcagcgttaaaagaaatcggattcaatgatgttgtctccgtagagctgttcagacctgaatattataagctgactgcggaggaaacgatcaaaacggcaaaggaaacaacggaagccgttgtatcaaaatacttcatgaaggaggcgtgaacatggcttttgtcaccatgaaacatcttcttgcagaagcgaaacgggagcattatgcagtcggccagtttaatatcaacggcctccaatggacgaaggcgattctgcaagcggcgcaaaaggagcaatcgccggtcatcgccgcggcttccgatcgtctggtcgactatttaggcggatttaaaacgatttccgccatggtcggcgcgttaatggaagaaatggcgattaccgttcccgtcgtgctccatcttgatcacggaagcagtgcggaacgctgcagacaggccattgacgccggattcagctcagtgatgattgacggctcccatcatccgattgatgagaacatcgcgatgacaaaagaagttaccgcttatgccgctaagcacggcgtctcagtagaagcagaagtcggtacggtcggcggcatggaagacgggctggtcggcggtgtccgctatgccgatgtcgccgaatgtgagcggatcgtcaaagaaaccaatatcgacgcgctggccgccgccctcggctccgtccacggcaaatatcaaggtgaaccgaatctcggatttaaagaaatggaggctatctcccgcatgactgatattcctctcgttcttcacggagcatccgggattccgcaggatcagatcaaaaaagccatcacgctcggccacgcgaagatcaatatcaatacggaatgtatggcagcctggacagacgaaacacgccgcatgtttcagaaaaacagcgatctgtacgaaccgcgcggctacatgacacccggcattgaagccgtggaagagacggtgcgaagcaaaatgagagagttcggatcagccggtaaagccgtaaaggagcaggtcggctgatgagaacggaaaccgccaagatggcggtttttttgtgcggtgttgcgcccgtacgcccgaaacgattatgatgatggcagcagtgtaagaaacgggagtggttcagtttgaataaaatcatgattgtggaagatagtgaagacattcgcggactattgcagaattaccttgaaaaatacggatatcaaaccgtggccgccgcggatttcacggctgttcttgatgtttttttgcgggaaaagcctgatgtggtgctgcttgatatcaatctgccgtcttatgacggctattattggtgccgccagatccgccagcattctacaagcccgatcatttttatctctgccagaagcggggaaatggatcaggtgatggcgattgaaaacggcggagatgattatatcgaaaaaccgttttcttatgatattgtactggcgaaaatcaaaagccagatccgcagggcatacggagagtacgccgccaagcagggagagaaagtggttgaatatgccggtgtgcagctctttgtggaacggtttgaactgcgttttcaggacgaaaaaagcgagctttctaaaaaagaaagcaagcttttggaagtgctgctggagcggggagaaaaggtgacgggaagagaccggctcatggaaaaaacgtgggacaccgacattttcgtcgatgataatacgcttaacgtgtatatcacgcggctcagaaaaaaactgcgggaactgaatgcgcctgtttccattgaatcggtgcggggcgaaggctaccagctgagggcgctgtcatgaagctgtttctccggtctcatgccgtgctgattctgctttttctccttcaagggctgtttgtcttcttttattactggtttgcgggtcttcattctttttcccacctgttttacatattgggcgtgcagcttcttattttggcggggtatcttgcctatcgctggtacaaagatcgcggtgtgtatcattggctcagctcggagcaggaagggacggacatcccgtatctcggttcttcagtgttttgttcagagctatatgaaaagcagatggagctgatccggctgcagcaccagaagctccatgagaccgaagccaagcttgacgcgcgggtgacgtatatgaaccaatgggtgcaccaagtaaaaacgccgctgtcagtcattaatttaatcattcaggaagaagatgagcccgtctttgaacaaatcaaaaaagaggtccggcagattgaattcgggctggagacgctcctttattcatccaggcttgacctgtttgagcgggattttaaagtcgaagcggtttccttatcagagcttctccaatcggtcattcaaagctataaacgattttttattcaataccgcgtctatccgaaaatggatattcgcgatgatcatcagatttacaccgatgcgaaatggctcaaatttgcgatcggccaagtggtcacaaatgcggtcaagtattcggcaggcaagagtgacagacttgagcttaatgtcttccgcgatgaagacaggacggtgcttgaagtcaaagattacggtgtcggcattccctcgcaggacatcaagcgggtgtttgacccttattacaccggtgaaaacggacggcgtttccaagaatctacgggaatcggcctccatctcgtcaaagaaattacgggcaagctcaatcatacggtggacatcacttcgtccgccggtgaagggacatcggtccgattttcatttcttacaaaaatgtaagactgcgttaagaaaacaacatagctcgttctgtttccccttgataacatggatttacgtcaaggggatttttatgttaaatgccccggcactacatgaaagcagcccagaccaacaagaataaaaccataaggaggattttcatggcgaatatgcttgaagtcaaacatataaataaaacctataaaggacaagtgtcctatcaagctttaaaacaaatttcgttttcaatagaagaaggcgggttcacggcggtgatgggaccgtccggctccggaaaaacaacgcttttgaatatcatttcaacgattgaccgtccggattcaggcgatatcctgattcacggagaaaacccgcaccggctgaagcggacaaagctcgctcatttccgccgcaagcagctcggatttgtgtttcaggatttcaaccttctggacacgctgacaatcggtgaaaatatcatgctgccgttaacgcttgaaaaagaagcgccgtctgtcatggaagaaaaactgcacggcatcgcgaaaaagctcggaatcgaagacctgctcagcaaacggacgtttgaagtatccggcggacagcgccagcgggccgccatcgcaagagcggtcattcataagccgtcacttattctggccgatgaaccgacgggaaaccttgattccaaagcgtcaaaagacgtcatggaaacgatgcagagcctgaatcaggatgatcatgtcacggctttgatggtgacccacgatccggttgcggcaagctactgccgccgcgtcatctttataaaagacggcgaattgtttaatgagatttaccgcggagaaaaccgccaagtcttttatgagcagattcttgatgtgctgtctatgctgggaggaaacgcaaatgacctttcttcagttcgcttataaaaacgtcacgagaaacaaaagggcctatcttgcattctttttaagcagtgccttttccgttttgattttctttacctttgcgatgttcctgtttcatccggcactaaaggaaggctacctgaataacatcgccagaaaaggcttaaccgccgcggaatggatgatctttgttttttctttcttatttgttctgtattcggttaacgcatttttgaaatcaagaaataaagaattcggtattctgctgatgcagggcatcacgccggtgcagctgagaaagctcattacggcggaaaacatgatcatcggcgtcatgtcgatcgcagccgggattatcggaggcttcattttttcgaaaacgttctttacggtcggcgcttatattttagaaatggacgcgctgcctctgtacatgccttggaaagcgctcggcattacggccggcggatttctgcttttatttttccttttatcgcagttcacgatcctttttgtcagatcaaatacggtgatcaaattaataaagggcactgacaagattaagccggagccgaagccgtctgtgcttctgtccttattcggcatcgcctgtctttgcggcgggtacggcatggttctgaaaggcaatgtccacgggaccgagccgtttatcattttactgcttaccgtcatcggtacgtatttctttttcagccaaagcagcatctggattctgcgcgcgctgaagaagtggaaaaccttttatctgcgcgggaaaaatgtcatttgggtttctgatcttgtttatcgtttaaaagacaatgcccgcctgttctttatcgtcagcattatttccgcggttgcgtttacggcgacgggcgtgctcgcgatgtacaaatcgaccgtcggggcggaagagtccgcttatgagatggagtatgtatctttcagcaataatccaaaagaacagactcatttgaaagatattgaccatgaactgaaaacacacggctttacgtataagaaagacaaaataaatgtttcctatgtccgctatcaggaaggagatactgttccgcctgtttacatgatcagcaaatcggatgtatcaaaatacttccatgttaagctgaacggcctgaaacatgatgaggctgtctatttcccgggcacgtatgaccgcaatttcaaaaacaaagcgccggatcagctgaagctgctgaaccaaaaaggaaagctgtccggacaaaaactgtcagtaaaagaagtcaaaaaaccgctgatctcattgaatgccatcatcgcggtgaacgatcaaacctttgatcagctcaaatcactcggtgataaagcgtcattatacggctacagctatgatcattggaaagacagtcttgggatcagccaatccttgaaaaatgagatttacggcaactatatcgacgtccattctgattttatggcaaaagccgggacgtactatgatacggtgcagctgccgagcctgagtttatttatcggcctgtttatcgcgatcgtcttctttgtcgcggcagcaagtttcttatatttcaggctgttcactgatttagatgaagaccgggagcgctaccgttcactggccaaaatcggcctgagtgagcgcgaaatggcacaaagcgtgacgatacaattggcaattctgttcttctttccatttgtcattgctgtcatgcatacgctgtttgctttgagaacattggccgtggaaggctattccgatgtagcggggccgctcagtctgaccatcggagggtttttcatctttcagcttctgttcttcctcgcggtgcggacaagctatttgaaaaaaatgaacaagtaaggggagtgcacagatgaaaaaagcattggcaatcctggccgtcttggcggccgctgccgtcatatacggacttctcttttttcataatgatgttacagacagatttaatccgtttattcaccagcaagatgtttatgtacagattgatcgagatggcaaacatcttagcccgggcggtactgagtatacattagacggatacaacgcatccgggaaaaaagaagaagtgacctttttcgccgggaaagaccttcggaagaacgcgtatttgaaggtgaaggcgaaaggaaagtatgtcgagacctgggaagaagtcagatttgaagatatgccgggctccgtacagtcaaaattaaagtgaacatgaaaaacggcacagtgtcatgactgtgccgctttttttattttttattttcttcagcccgtttgatcagcatgtcggtgataatatccatctgtttgctgacggcaatcgggtcatacggatagaaggtgttgaaatcgttgataaagacacgattgtgttttacggcatcgagatttttccaaacggatgaatctttcagacgctcaaatgttttgctttctccattcggattgtaatcggtaatgaacatataatcagccgcatattgagggatgacctcttgggaaacctgtttcatggcgcccgttttcatgatgtttttttcaattttggccggcgctttcaatccgagcgcgttataaacggcttggccgccgcggcctgaattgtcattgaaaatccagatttcgcctttatccgtcgtttcataaaggccgactgtctcgtctttgccgatcacgtttttgaggcgcttttgattcgcttcagcttttttgttgaagtctgccataaagcttttggctttatccttcgccccggcaatgtcgccgaataggctgaccgtatctttcgtattctttgcggtgttaaaaggaatgacaatcgtcggcgcgatttttgatagtttctcgtattggtcttccttcatcagcacgattaaatcaggcttcagctgcatcactttctccacattgacgggattgccgatgtcagtaatgtttttcagctgttttttgataaacggatttttgaaagtccatgagcccgccccgacgacatttgcgtcaacggacagcagctcacctgcataaaagtcagtgacgatccgtttcggatgtgcgggtatgtcaatatttccttttgttgattcatatgtacgcatgtctgtctttcctttgcctgatgccgatccgttgttttccttcgcgccactgcaagcgcttaatgcgaaaacaagcagaagtgccaggccgatcagccatgattgtttcttcataatgatccccctatttcggtgataatgattatcattattaatatagcaggaagacgtcattccgtctatgttttttatagaaaaccttccttgattatccatgttatagtagtaaaggaggaatgaatgttgattacgaaaagagggacttggtgggaagtgctgcacagctggctgctgctgacttttgcgccgtttgcgctgaccgctttcttggcctttttctatatcggctaccgggccaagaacaaaaaatggctgaaatacggacttatctattttattattttagcaattgcttttgtgctgccgagcacgccgggcgtgtatatcgtgctgcctttatggatcatctccattatccacgggctgaaagtgcgggcggcttatttaatacagcttgatgtgtttaaacaaaacgtcgaagcaagagcgtttgaagcggtaaggcatgaggctgaagcaaaattcggcggaaaacccgctcatcgcattgatctgacaaaacagagataaaaacaaatgacaaagccggtatctcgtgctttgtcatttgcatgaccggcctattgctggtatgaatgctgctgaaacggtgtgtgatgctgtgtttgcgggaatgaagaaacattagcgtttgccatcggtgcaggcatgtgtccgcttacttcctgctgaagctgattgcacacattcacgatttgctggcatttctgaatggccagttcatgcccctgaagcgcttgctgaatggtatgaacggcatgctgttcatggttaagcatctgctgaagcatttgaatgttttgctgttcctgctggagcatttgcttgtactgctgactgctttgctgtgtctgctgaataagctgctgtgctgtttggcggcattgctgcagctgatttccgctgtactggttttgatacatcatgaagacctcctggagtaattgattttacacatttatcatgtgaaagaataggagaggcattcatgcaagaaaaggattcaaatatttacctgttatgtacagagcggaatacaaggctcgggatggcctgtcgagctttgtattccggccctttttctcagaagccgccttctgtagcgtgaaaaggaatattgagtctgttttcgactgcgcgcaggcgctgattcaaacggtttaagcggcgggtatggatttcaatggactggctcagccgcctgatctgctcattcatacgcgtgatttcccggttttggcgctggtcttcttgtgagaggcgggtgagctctctcgtttgctcggcgttttgtctttcaagctgggcaactctccgttctaaacctgtcggctgccgctcttcggactgagggggcgcataataatagctttcctgctgctgatacggctcatactcaacgcggctcacttcgtattcctgctgctgagggaaataggcagtcggggtatagtactgatatgggttcattcatcattctccttatctagtgaagtctttatacactatgtagtcaattgcacagtgccacggcatccgcctaacttacagacgtaaaaaaagcttcaaaggaaggtgatcatgttgcggaacatacggattttcatcatgacggttcttgttttcggatgcgtcatgataacaggctgctcgcaaaagaaagcagacgaacctcctttttattacgggacatgggatgcggggctgaaaccgggcccgatggacggggtcagatctgaaaccgtcacgtttacgaaagacagcgtgctgaccaagcaggtcattaaaggccgcggcgaggttcccatgccctcggatgtgtacaaggtgatctcacaaaacacggacggaacgatcgagattgaatacctcggacatccgcatcccgtcaaaagcacgttgaaaagaggaaaaaacggtacgctcatttggaagatatacggagaaacaaaaacaatgacaagaataaaaaccggcggggaggatgcacatgagaaataaggctgccgacagactcgttttgacgggtgtcatcgtacatatcattcaatggttttcactgttatggttattttttatgctttttgatcagttcgggcgttttaccatttacaatcccaatgtcgtcaacggcagcatgcagtctttttcattctttgatatgatgcgcgctcttctgttttccggcacgctgcggaatacgctcctgctgtttctgtttgcggcaatgctcatttacttgtgggtgaacgctctgtttatcctgctggaaatcgtttcttatatcatgatcaggcggaacagccgttcattatgggcatactttcccgcagcgatgggaataaagcttgcccttctggacatagcggccgtccctttctttgcggcggggctgatgctcttgaagcagaaaagagatgacggcggcgaacaaactgacaagaggaaaagacggctccgcatccggaggcaggcccggtatacgaagataaggcggagaaactcgtccgtttgatttttcattgaaacgaaaaagcgatatgatgaaagcataagatgaaaaggatataaaggagatgcaggatgtacaagttaatcgcaatagatatggacggaacactactaaacgatcatcatgaagtgacggctgaagtccgcggggcgcttgatgccgccaaagcggaaggggtcaatatcgtcctgtgcacgggccggccgatcggcggtgtgcgtcggtatttggaagagctgaacttacaggaagaaggcgactttgtgattgcctataacggcgcactcgtccaaaatacgtatacaaacggtgtcgtggccgagcagtcattaggttatgaggatttgaagtcgctttacgagctgagcttacagctggatactccgatgcattactttgacacagccaatctgtacacgccgaaccgggatatcagtgaatacacggtatacgaatcatacattacgaaagtgccgcttcatttccgcacgatcgatgaagtgccgaaggatattctgattccgaaagtcatgttcattgacgatccggacaagctggagaaagcgatcgcttccattccggaatcattcaaggaaacatacacaatggtcaaaagcgcgccattcttccatgagattcttcacccgaaagtcagtaaaggaaacgcggtcaagctgctggccgaaaaactcggcattgaacagaaagacgtcatggcaatcggcgataacggcaacgacatgtccatgattcagtgggccggctgcggtgtggcaatggccaatgccatcccggaagtaagggagattgctgattttgaaacgaaatcaaataacgaacacggcgtggcgcatgcgattcaggagcttgtgctgaaaaaataggcaccccatcagagggtgcttttttaccgcgtgttttggtgatatgataagcggagaggggaggcgcgacatggatcgtgaaaaacagcagctcagcatagaagcggcaaaactatattatcaatcagattacagccagcagcagatcgccgaacggcttaatctgtcacgccccaccgtttcaaggctgcttcagtacgcaaaggaaaaagggtatgtgcaaattcgcgtcatggacccgtttgaggatctggacgatctcggcgcgaagctggaagaaaaatacgggctgcttgaggcgcacgtcgtcttttctccaagcgacgattaccaggccattacacattacttaagccgctatggcgcagactatatgcataaaactgtaaaggacggcgatatactcggcgtaagctgggggacgacgatgtaccagatcgcaagccgcatggagccgaagcaggtaaagagcgttgaagtcgtgcagctgaaaggcggcatcagtcattccaatgtcaatacgtattcgtcagaaacgattcagctgttcgccgaagcatttcagacgatgccgaggtatttgccgcttcccgttatatttgacagcgccgatgtgaaacagatggtcgagcgggacagacatattaagcggatcattgaaatgggcagacaagccaatatcgccctgtttacggtcggaaccgtccgggatgaggcgctgcttttcagactcggctatttccgggaagaagagaaacaattgctgaaagcacgcggagtcggcgatatttgttcgcgcttttttgacgaggaaggcaggatttgcagcagcagcattaacggcaggacgatcggagtcgagctcagcgacttgaaaatgaaagagcgttcgattctggtggcgggcggcagcagaaaatgcaaggccattcacggtgccctgaaaggaaagtacgccaacgttttgattaccgaccagcatacggccaaaaaactcattcaagaattgtgacaattcatgaacataatttcaattaccaatttacatatgttcaaaattcggttattctaaacgtatcctaggaaaaaggaagtgcatacaatgtcaattgcaagtcaaatagaccatactgctttgaaaccgcatacacaaaaagcggatattttacaactgataaaagaagcaaaagaatataaattcgcttccgtttgtgtaaacccgacttgggtcaaactcgcagcggaggaactgaagggtacgggagttgacgtttgcaccgttatcggatttcctctcggcgcaacgacatcggaaacaaaagcatttgaaacgaaggatgccatctcaaaaggagccactgaggttgacatggtcatcaatatcggcgcattaaaagacggcgatgatgaagcggttgaagctgatatccgcgcggtagttgaagcagctgataaaaaagcgctcgtcaaagtgatcatcgaaacatgccttttgacagatgaagaaaaagagcgcgcgtgccgcttggcggtatccgcaggcgccgatttcgtcaaaacgtctaccggtttttctacaggcggggcaacggctgaagacattgctctcatgagaaaaacagtcggaccggacatcggggtcaaagcatcaggcggcatcagaacaaaagctgatgttgacagcatgatcgctgcgggcgcgagccggatcggcgcaagtgcgggcgtctctatcgtgagcggcggagacagcggcagcagcgactattaatcagcagtgcggaagctgaaagcttccgccatcctctttctttgttgatgcataaaaaattgtaagcgaatacaaataaaaggagaacacatatgaagtatctcatcggaattatcggaatcattgtgtttttaggtcttgcctggcttgccagcaacggcaaaaaaagaatcagaatccggccgatcgccgtcatgctcgtgctgcagctgattctcggttatattctcctcaacaccggtatcgggaattttcttgtcggcggttttgcaaaaggatttaactacttgctggaatatgcatcagaagggattaactttgtattcggcgggcttgtgaatgcgaaacagacgacgttcttcatgagcgtgcttctgccgatcgtttttatatccgctttaatcggaattctgcagcactggaaggtcctccccttcatcacgaagtatatcggtcttgcgttaagcaaggtgaacggaatggggaaaatcgaatcttacaacgctgtcgcatccgcgattttagggcaatcagaagtctttatcagtttgaaaaaacagctcggttatcttactgaacagcgcttatatacgctttgcgcgtccgcaatgtcgacggtctcaatgtcgatcgtcggttcttacatgatgatgctgaagcctgaatacgtcgtgacggcgcttgtgctgaacttattcggcggatttatcatcgcttctatcatcaacccgtacaccgtcagcaaagaagaggatttgatcgtcgttcctgaagaagaaaagcaatccttttttgaagtgctcggtgagtatataatggatggattcagagtcgctgtcgtcgtagcggcgatgctgatcggatttgttgcactcattgccctggtcaacggcgtttttaacgctgtcttcggcattacattccaggcgctgctcggatatgtattcgcgccgtttgcgtttttaaccggtattccgtggaatgaagcggtgagcgccggaagcattatggcgacgaaaatggtatcgaatgaatttgtggcgatgcagacactctcatccggcgatttccatttcagtgcgcatacacaggcagtggtatctgtattccttgtctcattcgcgaatttctcctctatcgggatcattaccggtgcggtgaaagggctgcatgaaaaacaaggaaacgtcgtcgcgcggttcgggctgaagctgctgtacggcgcaacgctcgtcagcttcctgacagcggcgatcgtcggattgattcactgaacataaatgaaggacaggtgatagatcatgagaatggtagatcttattgtaaaaaaacaaaatggaaaagaactgacaacagaagaaattcaatttttcgtaaaaggatacacggacggaagcatccctgattatcaggcaagcgcgctggctatggcgatttactttcaggatatgacggatcgggagcgcgccgatctgacaatggcgatggtgaattcaggggaaacgattgatctttccgccattgaaggcattaaggtcgacaagcactctacgggcggggtcggcgacacgacaactctcgtactcgcaccgctcgtcgcggcgctcggcgttcccgttgctaaaatgtccggccgcggtcttggccatacggggggaaccattgataagctggaagcgatcgaaggttttcacgtggaattgtcaaaagatgaattcatcaagcttgtgaaccgcgacaaggtagcggtcatcggacaaagcggcaatttgacgcctgccgataaaaagctgtatgcgctgcgtgatgtaacgggtacggtaaactccatcccgctgatcgcaagctcaattatgagtaaaaaaatcgcagccggagcagatgccatcgtgcttgacgtcaaaacgggagccggcgcgtttatgaaaacggatgaagacgccgtgaacctcgccaaagcaatggtccgcatcggaaacaacgtcggccgccagacgatggccgtgatttctgacatgtcgcagccgctcggttttgcgatcgggaatgctctggaagtacaagaagccattgatacgttaagaggggaagggcctgaagacttaaacgaactcgtcctcacgctcggcagccaaatggtcgtattggcgaaaaaagccgagacattggaagaagcaagaacgaagcttcaggaagtcatgaaaaacggcaaagcgcttgaaaagttcaaagagttcctgagcaatcagggaggagacgcttctgtcgttgacgatccgtccaaacttccgcaggcggcgtacaaaattgacgttccggcgaaagaagcgggtgtcgtttcagaaatcgtcgccgacgaaatcggcgtcgcagcgatgctgttaggcgcgggacgtgcgacaaaagaggacgaaatcgaccttgccgtcggcattatgctccgcaaaaaagtcggtgacaacgtcgaaaaaggcgagccgctcgtcaccctttacgccaaccgcgaaaacgttgacgacgtgactgccaaagtctatgacaacatccgcatctcagaaaaagcggaagcgccgaaactgattcatacgctgattacggaataagggaagtaaggcacatacctcatcagtatgtgcctttttttatggcatggttttatccaaatgaatgtcacggacggattgtttcggctgtttctttctcaaaaaacgaatgagatagcacaggatcatacaaggaattccgcagaagagggcgattctttgattgggatcaaatgcaaggcctacgcatgaagcgaaacataagatcacggcggcgatcggaacgagagggtataacggtgtgcggaaggtcagatccgagacgcgtccgccatttttcacataatgttttcgaaataacagctgagacagggcgatactcatccacaccacgacgccggcaaatccggctattgccacgagcaccacgtagaccgtgcccggggcggcgatgcttgagatcaaggatatgcaggaaacggccatgctggcgagcagagcattcagcggaatgcctttcggcgtgacttttttgaaccgggcgctgatcatgttttcattcgcaagagaccacagcatccgggtggaagcatacagtccggagttggcgaccgaaagcaaagccgttaaaatcacgaaattcataatatctgcggcgtatgggataccgatttgggaaaagaccgcgacaaacggactttcaatcacaccggcttccttccaggagatcagtccggacagcacaaaaatggcgccgataaaaaagataaccgttctccaggcgacattccggatcgaacgcggaatatcttttgccggattggcggtttcacccgccgtaattccgatcagctccgtccctgaaaaggcgaagcttacggaaatcattgcgatgaaaaccgcaagaaagccgttcggaaacagtccgccgtgtgaggtgaaattcgacagcatcggagcttcacccgaaccgtgcaatgaaatcaaaccgaacatcgcggcgccgcctaagatgataaataaaaggatggtgacgattttgacgctggaaaaccaaaactctgtttctgcaaacaatttaacggagaatgcattggcggcaaaaaggagagccgcgaaaatcgcgctccacatccagacgctgctgtggggaaaccagcgctgcatgaggataccggaagctgtaaactccgatcctaccgtcaccacccaattcacccaatacatgataccgaccataaaacctgtggacggcccgataaacgttgttgcatacgtttgaaatgaaccggtgacaggcatggctactgacaattctccgagacactgcatgacaagatacatcatcaagccgccgatcaggtaagcggcgatcgtcccgcccggcccggcctggctcaatgtataccctgtgctcaaaaacagccccgtgccgatgactcctcccaatgaaatcataaataagtgcctgcttttcatcgtgcgctttagttgattgccgccttgatcaacatccatcgtgatctccccctttttgcgtggcgtgagaatcttccggcagcagagagcacgcgtgccggatttgactttaacgtgacaatttaaatccctttaatgcatgtaaaatgacgtgtgcggctgcccggcttgtcatatcgcgaaaatcaagtgtcggatcaacctcaacgatctcaatacccgagatgtcagcctcctgggctaaaaacctgaccgcctgaagaagttcctcggtatacagacctccggggccgattgcggggcagccgggcgcatgagcttgatccagcacatccatatcaaccgaaataaaaatggcgtcggctcttttttgaacggccggcaagacctcttgtatcgttcggaggagccctttctcccggatcatctccattgtatgcacgtctgcctgccgctcttttacatattgttcatatgccaagctgttgctgaactccctgattccaagctgaatcaggttttgtccgcttatgatattttcatctaacagccggcggaatggcgtgccgtttgtcggccctccgtcttctgtgttgcggacgtcgtggtgggcgtcgaattgaaagacggccgttgttcctttcgtttccgcaatggctttaatagtggaataactgatggagttgtcgccgccgagaatgacaggcacccagtcaggctgatccgtcagaatgtcatgaatggtccgataaatgtgttcgtgagatgtgacgacatctgtgacgtgaatctgaatatcgccgatatcgtacagatggtcaatgacatgctcccgcagctctgcggaatatgcggaaatcccgccgagcgcccggcggatcgcaccgggggcaaagcaggcgccggaatggctgattgacgacttagaaagcggaacgccgatcaaagccggccctttgatcgtttgtcccgcccacgcttccgtcacatcgccgatccttgtcacatggcggtcgttgaagagggagccggctttttgcagaaacggatacttatccaagagcggctccctcccttgaaacgaccgtctttccgttcttgatgacacggtgtacatgattgacgccgtaatgatacgggatatacatgtaattcggcgcttcccaaatgacaatgtcagccgcccgtccggctttaatttgtccggcttcttcgccttttccgatcgcatacgcggcattaacggtgacagcgtgccagatttcttctgcggtcatttttaaatgaagcgcggcaatcgacatgatgagctggagattttccgtcggtgagctgcccgggttgaagtcagtcgccaaactgacccgtacgcccgcatcaatcatctcccgggctctcgcataagtgtgtttgccgagatagaaagtcgtgcccggcagcaggacagcgatcgttccggacgccgctagcttttcgatgccttcgtcagacgcccccaccaaatgatcggcagaaacagcatgcagctctgccgccaattccgcgccgccgagcgggtcaatctcatcagcatggattttcaggccgaaaccagcttcagacgcctttttcaggtagtcccgtgactggctgacggtaaagacgcctgtttctgtgaaaatatcggcaaattgcgcgaggcctttttcttttatttcaggcaaaagctgcagcatgcgattcagaaattcgtcagggctgttacggtactcaggcggaatggcgtgtgcccccataaatgttgtgacaaggtcgaccggctggcgcccgcccagttttttcgccgcggtcagctgtttcagctccgtgtctttgtcgagtccgtacccgctttttacttccgcggtcgtgatgccgtatgacagcatgcgtccgaggtgaaaaagccctttttcaatcagttcttcttcggaggcggctttcgtgtctttgaccgttgacaaaatgccgccgccttgtgccagaatatccaaataggacatgccctgaatttttaaattcagttctttttcccgggaccctccgaatacaagatgggtatggggatcgacgaggccgggggtgacgagccgtcccccgcagtcgatgatgtctcttgcctcgtatccttcctccgctccttgatgtccggcaaaaacaatgcgcccgtcgtgaatgccgatgacggcatcttccgtgacacgaagatcctgcatgcttccgcctgatcgggggccgccggattccatcgtcagcagctggccgatgttggtgagtatggtatctatttgtttcggcatgttaccgctcctttttcatcggtatcataatgtcttgttcctcggcgacttgagccgctttttcataacctgcgtccgcatggcggatgatgcccattcccggatcgcttgtcagaacgcgggaaagccgctgttccgcaaggatgctgccgtcagcgaccgcgaccattcccgcgtgaagggaataccccatgccgacgcccccgccgtggtgaaaagaaacccagcttgcgcctgaggccgtgttgatcagcgcgttcagcaccgcccaatcgccgaccgcgtcgcttccgtctttcatcgcttctgtttcccgattcggagaggcgacagatccgcagtctaaatggtctcttccgatgacgatcggggctttcagctcgccgtttctgaccaattcattgatggcgagccccatcttttcccgttcaccgtagccgagccagcaaatacgggacggcaggccttggaatgtgacttttttctgtgccatgtcaatccagcggtgaagggcttgattttctggaaacagctcttttaataaagcgtccgtgcggtatatatcttcaggatcgccggatagcgcggcccagcggaacggcccttttccttcacaaaataacggccggatgtaggcgggaacgaatcccggaaaatcaaaagcatcggcgagaccctcatctttggcaacttgacggatattgttgccgtaatcaaagacgatagccccttttttcttgaaggcaagcatggcttccacatgctttttcatactttgcttggatagccttacgtataaatcgggctgatcccggcgcaggcagtcggcctcttcaagtgagtatcctgccggaatatagccgatcagcgggtcgtgagcggaagtctgatcggtcacgatgtcaatatggacgccgcggttcaaaagctcatgatgcacctcagccgcattgccgagaagaccgatcgataaaggttctccggcttgtctggctgcttcggcccagcgcagcgcttcgtcaattgatgcggttttacggtcgcaatagtttgtttccatccgtttatcaatccgtgtttcatccgcttcaacggcgatgacgacgccatcattcatcgtgacggacagcggctgggcgcctcccattccgccaagtccggccgtcagcgttagggttcctttcagactgccgccgaaatgctgtctcgcaagctccgcaaaggtttcataggtgccttgcaaaataccttgtgagccgatataaatccagctgccggccgtcatctgcccgtacatcatcagtccttttttctcaaggtcatggaaatgctcccaatccgcccatttcggcacgagaaccgaattagccagcaggacgcggggcgcgcggctgtgcgtgcggaacagtccgaccggtttcccggattgaatcagcagtgtttcatcatcttttaacgttttgagggagcgctcaatcgcgtgaaaagcatcccagtttcgcgcggccttgcctatgccgccgtatacgatcagatcctccggcttttcggcaacctccgggtcaaggttgtttcggagcatgcggagcacggcttcctgctcccatcctaagcattcaagttcggtgccgcggccggcgcggattgatttctttacatcagtcatcttgtcagtcccccttcattggtcatcagtttttggtgatgctcattcggcagaaaagactccttcttcagccagtcactcagatgctcgatgtcataagaaaacacgcggtcttcttgtatggacggcacgatgtttctcatttcaagatagagctgttttgtgtaagaggcgcaatgttccgcaccccggtattccacggcctgcagcgcgcaaatggcttcaacggcaagcacccgtctcgtattcgcaatgatctggtaggcgtgtcttgaggcgatggttcccatgctgacgtgatcctcctggtttgccgatgaaggaattgaatcgacactggcgggatgggccagggttttattttctgacacgagggaggccgccgcatattgcatgatcatcgctccggattgtaagccgggctgagggctcagaaagggcggcaggtcattcagctgcggattcacaagccgttcgatacggcgttcagaaatattcgcaagttcggccgccgccactttgagaaaatccatggcaaaggcgatcggctgtccgtgaaagtttccgcctgagatgattttggcgccgtcttcgaaaatgagcgggttatctgtcgcggcattcatctcaatttctaatttttcttttacatacgctaatgtctgccatgatgcgccatggacttgaggaatacagcggatcgaataggcgtcctggacacgcagctccccttggacggtcgtcagcttgctgtctgacaagtaatagcggattcgctctgcgacatccatctgttcctgatatccgcgggcggcatgaatgtcctcgtcgaacgcatcgataatgccctgaaggccttcgatcgttaagctcgcgatcctttccgactgataggccagcttttcggcttcgaggtaagcgatcagccccatcgcggtcatggcctgcgttccgttgatcagcgcgagcccttccttagaggtcaggacggccggctgaaggtttgtcttttctaaagcatgggctgtcggcatccgggccccttcgtaaaagacttcgccttgcccgataagcgccaatgcgagatgagaaagcggcgccaaatctccgctcgcccccagtgacccttgctgcgggatgaccgggtgaatgcgatgattgaggtacgcgagcagttgatcaatcagctcagtccgcacgccggaaaagcctttcagcagggcattggctcgcaaaagcagcatggcccgcgatacagattccggaaacggatcaccgacgccgcacgcgtgagaaagaatcagattcagctgcagatccgcggcgtcttctttttgaatcagcacatcgctgaacttgccgaatcccgtcgtaatcccgtaaatggtcttctcttcctgaacgatccgttcaaccgccgccctgctttttttcacacattccatgctttcggcagatgcctgaacctcttcaaaatcaaacagcacacgctgggcatctgcggttgtcagtgaggaaccgtctaacgtcaccatcatttcaaccccttttcctttactttggtaaagcgcccatgcaaaaaggagctatgccatgaaaatgatatttcacgcatagccccctatcatctgaaatctatgggctgattcatatgtgattaattccgaccccgaatgtttcgtgctcaagccccttaatcggagccccgatcgtgccgtaaagtgaaacggcgatccaatcgccttccgcctcgctttcatacggatttccccgcaagacggcaaacttcaggcccacggtacgaagcagcgagccaagcagcatttcgccccgcgtcactccgtgcaaagcttccattgtggcatgatacagcgcatgtgattcgcgataaccctcagattgaatgacgccgctctttttggaagcggtttcaattgcggctaccaccttatgcgcatccattgaacccaccctgccgagacagactttccagccgtcccgttccagccggctgatctgctggttttcttcagtctcatgaagcagaagaaggacggacaatcgcccgatgcggcggtctttgtgtaaggtcatatatgcttcactcaattcttaaatattctgataactagtaactgttttttatattaagtgtttgcgaatcagaagtcaaaactttttttccagtctttcacaaatcagattgctatcgaagtaaagcggtacatcgtgaagccggcgctgttgatcacatatttccgccatccgcgtcataaaatggagcgttgtcttgaaagcgttttaagaaaagaagagagcgaggcgatttcagaaaatgaaaaccagtttctttcgtgtgtgcctggtctcagcagcggtcatcgggttcactctgccgcaggcaaaagcccagcatccggttttttcagaggtcagcgtgcatgatccgtccgtcatcaaaacaggcaatacatattatgtattcggctcgcatttggcttccgccaagtcgaaaaacctgatgcagtggcagcagatgtcttcaagtgtcaatcccaataatcccctgatcccgaacgtctacaccgaattaaaagagacattcgactgggcccagtctgatacgctgtgggcgccggacgtcgcccagctgtctgacgggaaatattacatgtactataacgcctgtaaaggagactcgccgaggtccgctctcggtgtcgccgtgagtgacaaaattgcagggccctacaaaaacaaaggcatctttttgaaatcgggcatggaaggaaaaagcgaagacggcacgacgtataatgcaaacgttcatccgaacgtcgtagatccgcaaacgttttttgaccataaaggcaagctctggatggtgtacggctcttactccggagggatttttatactggaaatgaatccgaaaaccggtttcccgctcccgaaccaaggctacggaaaaaaactgctcggcggaaatcacagcagaatcgaaggcccgtacatcagctacaatccggaaaagaaatattactatctgtatctgtcattcggcggacttgacacagccggcggttatcatatgcgtgtggcgcgttccaaaaatccggacggtccgtactatgacgctgcaggccataacatgcttgatgccaaaggaaaagacggcagcttcttcgatgacaaagcaattgaaccgtacggggtcaaactcatgggcggctacagcttcgcctcacaatctggaaaaggcacgggctacgtatcgccgggacacaactccgtgttttacgacgggaaaacgaaacgatcatacctcattttccacacccgtttcccgaacagaggagaagagcacgaagtcagagtgcatcggctgtacatgaacaaagacggatggcccgtggcagcgccataccgctatgcgggagaaccggatacacacattccggcggccgccgcatccggaacctacaaactcatccagcacggaaaagacattacagctacgatcaaaaccccaaaaaacatccggcttaacaacgacggcaccatttccggggaaatgactggaacctggacaataacggacagcagcaaagcccgactcaacctgaacggcacaaattatgacggcgtcttcctgaaagaatgggactcggcgagagagaaagaagttgtgacgtttagtgtgctgagcggtgatggggaggctgtttggggagtgaagtgaggtggactcagaatctttttttaattaagaaggttcttttttttgtaatataaaaaatcacttgaaaagtaattaatactctatagagtataatattgttatagagattgttttattatagttgtaagttcttttaaaacaagttcattttttgaaagaggagaaatatgagtaatgttgtacttcaaagctttttagaaaaggttatagcgaaaaagattttagataagttaaatagtatccgggataatagtaatattaaacaaactcatttaagtacaaaagccggtaagagtgataatgcttttaacaaaatgctgaatgaaatgaaggttcctaaaatatcaacagttttgagatacctcgatgctactaatgagctgctgaaagaaaataaaatgaatgaaataacaatagacgagcttttggatattgaaattctagaaatagtgagaagaacaaataacattacagatggcgattttgacagttatattgaacacaataaggattttttaaaaggtataacgttctattttgaaattatgaaaaagaaaaaaataatgagtattgaagaagaaaaactttatatgaaaattaaagaattataaacagaaatggagactgagatatggcagcagaaaggcttatttggttcattacaaggccggaaagggatccaaagtttcacaaggaagccataaaggctttatataaagcaactgatgaattaaaactgacttggtcaggtaatagagaagtacacaaaagatatgaacaagagttagcagatataggtattaaaagacagaatataagtgagagcggatcgggcgggagaacatggatggcattactaaggacttttgcttattgttatttagatgaagagggaaaggttgtactgactaaagccggaaggtctatactaaaagaggaaaaagtatatcaaaatattcggaagcagatactcacctttcaatatccaaatgcatacttcttagaaaaaggatttaaacctaagtttcatgaggactttcaaatacgtcccgtaagatttttaattaaattagttaatcaagaatcgctagattattatgttacaaaagaagaaattacctattttgtaatgattgcccaaaaggataatcaaataaaagaaataacagaaagtattatcaatttccgaaattctagtgttgaagaacaaaataaattaaaacaaaatatagctgaaaagttcgaacatagagagaggtcagataaaggagctcgagatttcaatactgctcattctgatgttgcgcatacttttatgctgataagcgagtatacaggattggtgaaatatgttagaggcaaagcattaatagttgaaaattccaaaaaagaggaaataaaaaatgagatggaaatattggatgcaaagtatccgtttaataaacgctatctcatttctttgcaaagaatgtttgaaaataacggattagatgttgacagctacaaagcaagctccttccataacataaaacctgcaactaattcattaaaaacaaaaaggaagcttcaaagtattcttaaaaatatacctactccgtctatgcttgataaagaagatcttgttggaattctaaatgaagaatttcctcggagtgatgcagaagagtatgctgatgaaatcctggctgataatcaatataaagccttaaatattaactttgtcgagagctacttaaatgagaacagcgatcatcaatttgaaaaaagtacgggaaacatttttaaagcgttgggttttgaggtcacaatgcatcctaaagctttaaatggggaaagaacagaaattgatattttaatcagttatggtaacgtgtatggaataatagatgcaaagagatacaaggataagtttacattaagtgcttcttttgcctctcatatggcttcggaatatataccaaattataaaggttacgaggataaagaaatggttttttatgggtacgtaacagcatcaaatgaatttagaggtgttaaaaatttagaaaaaataaaaagattaactgaaagaaatcttcagggatactctgttgatggtattatgctgaattctaaaactttattaggattactggattattgtatagaaaatgaattaatgcctgaacaaagagtaagtatttttctcggagcagtaaaaaataagagtttttcatcatttgaacaattactaaaagaagtcaacaaaggttaagagattgaattatgcatttagagtagaaactttaaattatctattagtactatgtttttaagcgtgcttacagagttgtgtttatatttatagagtgcctgaattagaaaaaggaatctgactgcagattccttttccttaaatcatataaggaactttttcctctttaactaactctttaaaagtccattttggctcaatagagtcatattcaattccagcaaacgtttttagtatcgcttctgcaataatttgagcagcttttggagggacagccatgccgatttgctgtcttaccttttctttctttccttcaaatacaaaatgatcaggaaaggtttgcaggcgtgcccgttctctattggttaaggcgcgaggctcttcccaatggtatacgtgagtgccgccgcccccgcttccagtcaccgtataagatggttcatccggatgaagacgtttataaatctgactcattcgggcacctttcactttaagtcgtaattcttccgggatgccctcataccaagcgttctttccgggaggaatataattcagcatctcaatagttttttgattatgtttcgtaggctcgtgattttcagtaaaatcaagaataggcggattattgagtgcgtcgtatgcagtaacatactgattaggagtagtaggagcaggaattttgaattctaaattctggtcttttctgatacctactataataatacggtgtcttttttgcggtacgccgtattcctcaaatttatataagtgaggagtgattgtataacccatccccgcttctcccagttctctcaatatctgaataaaagctttaccttcatttgcactttgcagaccgcccacattttcagcaataaaaaatttcggattatgataattgagcacctttacaccatatgagtaaagagggccgtaatctccgctcattcctttatgttctccaactatactgtaatcattgcaagggaatccaaaggctaatgcatctataggagggaggctttctatatccaattcttgtacaggaccctcaattactgacgggtcatcaatatttttgcagatatttcttctgtatgttttacatgcagattcgtcataatcattagaccactcatgttttatgctgtattcattaccggaactgtcaacgacacgggcacttgtaattcctaaagacagtcctcctggtccgctgaacaattctccttttcggaagatcatataaaaacctccatttgttgatctcatacacattataaactataacacatcttaatgctaaaaagagaacgtttgtttcgcgaatttaaaaggagaaaacttttgttttaatagaagatttaaatgttttcattgagggaaaacttttacaaatcgggaggggaatcgtatggctgacactcatacaaaagaacaaagaagaaagaatatgcaggcgattaaagcaaaatcaaaattagaagataaagtatccgcagccttatggaacagggggctgcgattcagaagaaatgtttcatctctttttggtaagccagatatagctattaaaaaatacaaaattgttatctttgttgattcttgcttttggcacggatgcagctctcacggaaatcagccaaaaagcaacaaagtgtattgggagaaaaaactgaagcggaataaggaaagagatcaacaggttacttcctactatataaaacatggctggcatatattaagggtttgggaacatgcttttaaagagaattttgaaagaacaatagatgagatagaaacttttataaaaacgaatatgtaaataactgattataaatttttccggtgataaataattcctttttcctattcatccaaataaacccatagtgtaacatgaaaatagtctataatgcccaaaatttacaagcgaggtgtttacttatactagcagagatgaacgcattacattcggcaagagccgactttgatataaaacaagagcacattcatgccctgaaacaagtcagccatgaaataacaaatttaaaacatgagtttgcagatatcaaccatttgatcagtcagcctcatttatccccgcatacgtggaaagggagccatgcaaaggcctttgaagagtgtcgcgaagatatggcacatgcttgggctgatatcaaaaaggaccaggtgaacgggataattgaacgcattaatgaaaagatttctatattagagggtgacgtgcatacacttcagcacagaatacgatcaattgagaatgagatccgaaaacaaaaagagaagagatgaggtgcgatatgggacaggagatcaagatggatttccatatggtaaagcaggggacaaactgaagctgtatcaagcccatttaataaattaattgtagaagaagctaaccggcagtacggttgcgggtggatttttctcacgctgactgtcagaaattagcaggagaagagctgaagtctaagatttctgacatgatgaaagggtttaatcgtctcatgaaatacaaaagggtcgatacagcggtacttggctattttagagctttagagattactaaaaatcatgaagaagatacatatcatccgcattttcatgtgttattgcctgtgaagagaagttattttggcaaaaattatatcaagcaggcagaatggacaagtctttggaaaagggcgatgaaactggactatacgccgattgttgacattcgaagagtcaagggaagagctaaaattgatgctgagcaaattgagagcgatgtgcgggaagccatgatggagcaaaaagcagttctcgaaatttctaaatatcctgttaaggacacggatgtggtgcgtggcagcaaggtgacggatgataacttaaatactgtgttttacttggatgatgcgctttctgcgcgaaggatgatcgggtacggcggcattttgaaggagataggagatacataaagatctgagatctgaaccttgaagatgcggaagacggcgatctggttaagattgatgaggaagacgatgaggtggcaaacagcgcttttgaggtcatggcttattggcatcccggcatcaaaaattacataatcaagtgaaagggagcaggccatgtggcttgctctcttactttgtggaaccgttattcaatacaagcagaaacgatggccgtaatgccaaagaagtccattatcgcctcttttatttcagggctggcttttgaagctgctttggagactgctttgttccaagcggtttttttactgcggtattttttcttgtaataattgtagtactgatatgttttagtgacgaatgtctttactccacccaaggcttttattgcctttttgatctttaacaattttgcaggagcgaaagctaggctggcaagtgcggtaccaacagcacttatacaacctaggacaccttgagtcttgaatggtttgtccgattgatgaagctcagttgcagcggcgttcatatcattgattagcgattgatcatcgatgttatttctgaaccaatctaaaattgcatcagaaccttggttgaccactgagtcaggtatgttttcaattgcgtataatgctttttgactagaaagcaaacttgaaaattctttttcgagattagtgtctcgaactaatgattgattattcggtgattcagcggcttcagcggctgtcgttccaaggattgaaaataaaaacactgaaacaactgccaaaataattttacttctgtactttagaacaaatttcatattatcccccttttttacttaaaaataccttgtaaattataaaccattttaccgcttgattccatagcggaaattgtgtcatgatggatttaggtatataaagtgtttaacagaaagagtgaggggatcagcaatgagtgacaaaaaatatgaatctatacactggtttgcgtcagtactagcgtttttattaataattttgaatagcttttttacaaaaattgagggtgtaactgttggtattgcgattgtatacatagtgatcatgggaattgttaggagtgcatggaaaaaagctaaaatagattaagcaggccttcaggcctgtttttttattgcggtgcaaaagagagaaaattgttatgcatgagtgaaaaaataaaaaagtggactcggtgaaagtctccttttttgtaacacgcctgacggaaatcgagagatttagcatgtacacaggtttgtgtgtataagtgcgccattttccgtgagttctaattccaaaattgccactactttttttgtttagtggctgcgatcattctttgtgtctctagcgacttccgtaatgccgcagtgagtgtctcgtgtctttcatgctgtcttttttcgaattgttccatccgttctgccattctttggttgaattcttcctgtcgcttcatgaattccaccaaaggattgtcctgtagcgatgtagcggtatccgatatggtcagttttgaacgatacaggcttgctatatgctttaccgtttcgtcgagtgagtgtccattgatcttagtcattgtacatagatactctaaagtctttacgtcatcttcggtatagagtcgccatcctttcgaatctttattgaacgagtagccttgttcttcaagcatactggcatacttgcggacagtcaccggctctataccgaggtgttttgcgacgtccttggacgataatttgactcccatatccatcacgaatcacctcgtaaaataggttcgctatggcgaggtcagacacctttaagtgttgcaccctttattatgatttgagttgttttgaaaagggtgcattttaaaaggcgctgcatacctaaacgagaggaaaaatccagtcatgacaggggactgactgggttcttttgtgtttgagtttgttttggaatttaggagcggtcacggagtgcccagttatacgcaccataaattggggcgtactggcgaaaatgacccgcaggggccggaggggtagtaatgcaagagattgattttgaaacagggatgaaatatgtaagagcaacccttggctttgagggcttagtgctgacggaagaagaggaaaagctcttagaaaggcggtttcatggagaaatcacagaagaagaatacatacgaaaagcgctagagctgtcttattccggtagttcaaaataagggatgtgaagttttcgaggggttgggaaggagccgaaaaaatgaatgttgataagaagagggaaatccaaagaaaatataaagagcaaatgcgaaggaaaaaagtgacctacactgtagaagcagtggttgttactgcgattgttgtgttaattatttttttgaattgcgttattaaaggattttagggaagcaagcgaatagggcgtgagtcaacggtaaccggaccgtagggaggattaaggagttgactcactcagcgccacccgaacccttttagaatgaaaaaacgctacggctatatctatgtcgaccgcggcaatgatggaaaaggcacgtttgaaagaaaaagaaaagtttttattggtataaagacgtcatcgccacaaacggataaagtctgtaaacgcaatgttccaaagcaagccggcaagattgacattcagcaatgagaggaggacaataaaagcagaaaggcgggattcatatgtttaaaaaaattcttgcagcagtagacggttcagacatgagcggcaaagctttggacgcagcgatccatctggcgaaagaacaggaggctgaactcaccattctctatgcgggacgtgaagccgttgtctccacatcagccttaacagggattgtctatgttccggaaaacttcattgaagacattaaacatgaagtcgagcaaagaggagcggccattctggaagaggccaagcagaaagcggctgaaagcggggtaaacgcggaaagcctgtacgtccaaggcgaacctgcgcatcaaattttaaacatagcgaaagaacagcatttcaatctgattgtcgtcggaagccgcggaatcagcggatttaaagaaatgatgctcggaagcgtgagccataaggtctcacaattgtctccttgtcctgtactgatcgttcattaaacagaaggccctgctgatgcggggcttttttttaatgagaaaagaccgccgtctttcgaaaaataggatgaaatcttcctctgaatcaagtaaaatggctgttagtatttgtctgaataaacagtcaatgatatgggggaagcaaatcaatgcaagctgaacaaacatcaaatgccgtcatcaaaatggtcatttccatggtcattttcggatcaatcggctttttctcggaacatacgaatgtgccttcaattgaactggtctttgtgagatgtctgtgcgcctcattgtttctgggcgtttgctggtttggttccggacggcaccgcaccgaacaatggaaccggcgtgaggtgctgcagacactggcctgcggattttttctcgtgctgaactgggtgtttttatttaaatcgtttgaggagacatcagtgacgatagcgatttccgtttatcatctggctccggttctcgtccttcttctagggagccttatatatcgggagaaactgcatattgtgtccgtcacttccatcgtgatttgttttctgggcaccgccctgatttccggcatcaacggaagtacatcattttctcagctgatgggatcgggtattatttgggccgtgctggccgcccttttttatgcttttacgacactggccgggaaaggcatcaacagtctcagcccatacgccgtcacctgtttgcagaccggattgggcgttatcattcttcttccgttcgtccgtttcggcgctttttctgatttgtcgcatgtgaactggatcatgattgtgtcaaccggtatcattcatacgggaattgtgtatttgctcttttttgacagcttgcggtttttatccacccggtttatttcaatcatcgtatttcttgatccggcggtggcgattgtgcttgacaccgtatttacgggatttcgccccgacctttatcaatctttggggattgtattgatttttgcgggaatggcgctgtccctgattcgaaagcaaaaagccgtgccggcggaaactcaggcagacagcacccgtatataggcggccgtatcggctgctttttttattttggggcttttcagccataacgaaaaagcagacaaacagatcatggaaaaagaggatagtaattgtataatacttcatgtgtttacaatttaagagattaaaggagtgaagggcatgaaaaagaagacgcgtcatctcgctttcttggctgcactcggttttgcgctttgtctggccatcgtatgttccgtatcaaagcaggcagaagcggcagcggcttatccggatgtgatgcagggacttaccggattcgcgggaaatgcgaaggatcataacggaaaagcaaaatccgccgtatcgggaggccagggcggccccgtcgtctacgtcagcaatcttaatgatctgaaaaacaatgcgggcggaacggaccgcaaaaccatcgtcatcacaagtgatatttcttccccgggtaaagccgttgtgacagtcggcgccaataaaaccatcgtcggctcttataccagccacaggctgaccaacatctatctgaccaccggctccggctcaaacaatgtgattttcaaaaatctcattatcagccatagtgccgccattacgggcaacaacgacattccgatgtacatagcgaacggacagaattactggattgatcacgtgtggtttgaaggacacagctacaatccgaacagccacagtgatttgggaaagcttctgtatgtcggcgccaaagcggattttgtgacgctgtctaactctaaattcacagaccatctgtacggcctgattctcggttatccgaatgatgataacgaaggacgcaattatatcggctatccgcatatgacgatcaccaacaactattttaataacgtctatgtgcgttcaccgggcctgatgagatacggctattttcacgcgaaaaacaactatgtgaccaatttcaatttaggattcaccattcatacaaacgcgactgtcttctcagaagccaactatttcggtaacggaaatgaaaaaggcggaatgatagacgactacgggacggcccaattcaccgacatcggttcattcccgtcgctcaaagccccgaaatcaccgcgcaccggctggaatccgagatcaaattacagctacggcacgctttcagcccaggatgctaaaaacttcgcccaatcctatgcgggagcgcaaaatacaaatctccgctatccataatacgaaaaaccgccggcggccggcggtttttttatatgaataaaaggttcaaaatacctgtaatccttaaaataaccttaaatacctaggaaaatattgataaacaatttcaataatattactattgttaagcctatattacaaaaggaggagggaaacctatgaaaataggaaaaaagaacaagtggaaaaagtggttggccggcactcttgcggcaacgcttatgatttccattgcgcctgccgatgtatttgcggcagaaacgcgtgaaaaacaagatcaagcgaaaaccgccgccattccggccgcagacccggaaaaagatcttccggcggaaaaagcatctgagcagatgccttttgatcaaaaagatatcaatcaagacggtgagatcacgtctgaaagaactgagaattcaaagctttactatgaaggcgagggtgtgtacaaacaggaaatctacacagaccccattcatacgaaagaaaccgccaaggcggactgggaagacgtttcccctgaattgaaaaccagctcaaaggaagtcggaacggaaaatacagtgctgaattccgattttctgaagcaaatgaaaaacggattatacgccacatttgaacatgatgatcataagctcacatactcattaaccggcgcaaaaggccccgatcaggctgcaatcactccgacagatgcctcagcaaaagtcaaggaagacagcaacgagcttacgtatcagcaagtgtttcctgctattgatttacaaacctacacatttaacgaaaacataaaagaagaccttgtgcttcacaaatatgaaggctacaattccttcacctttcaaatcaaaaccgaccttcaggctaaaaaacaggaagacggctcgatcgcgttttctgatgataaagacaatgtcgtctataccgtgccgaagccttttatgaccgactcagatctcgacgaaaagtcaggtgaagtcagcaggtcagaagatgtcagcttcaagcttgaaaaaaacagcgaaggctacttgctccatgtaacggccgatgaaaaatggctgaaagatcccaagcgggtttatccggtatctattgacccgtcgacatcagtatctgtgtcatccgatacctttgtcatgagcgcgtatccgacgacaaactactctgccgcgtcgcagaaatgggacgccggattgaaagcgtacgtgctgaaaactggatattatgacggcacaaccggaacgaactacgcttttatgaagtttgataatctaaagccgatcaaaaacatgacggtgacgaaagcgacgctcaaagcatacacagcccactcctattacggatcaaaggcgacggggctttggctcgacaccgttaacagcaattacgacaatgccaagattacgtggaagaacaagccgggctccaaaaacatcggcaaagccgaggtctataaaggccaatgggcaagcttcgatgtcacctccgcagtcaagtcgtggaacagcggcggcgccaattacggctttaagcttcacgcaaacggcaacggaaaagaatattggaagaagctgatgtcatcagcaaactctgctaaaaaaccatacattgaagtgacatacacgattccgaaggcggacacgccgtctgtcaaagcgtatcataacggagattcgacaggatttttcaatatcagctggaaaaaagctgaaggcgccaaaagctataaagtgtggctttataacgggaaagaatatcaagccattccggtcggcaatgcaacctcttggagcacaaaaggaaaaaacatctggccgacaaaagcggaaatcgactccggcaaatataagctgcatacagacggaaaaggcggaagtgaattagcgcttaatccttcgccggtctataaaaactccggcggcagctatccggcaagtaaaaattactgggtcgcggtcagcgcggtgtttgaccagggagaaggcgccatgtctgcggccgccaagcccgttattccgaatattggcagagttcagaaaccaagtacgaaaggctttaataacaacaacgccacaggctggtttgatctttcctggaaagccgtatcaggcgcagccgggtataaaatgcaagtctttaacggcaaaagctttgaaacgcttgacctcggaaataaaacatcctggtccacaaaaaatcaaaacatctggccgacaaaggcggaaatcagcgccggaaaatatgcgcttcacctgaaagacaaaaaaggtgcggaattgccgatcaacccgggccccgtttataaaaatgccggcggagatgcgaaccggaaaacctacggatttaaagtcattgcctataacaaagacggagaagcgatcgcctcaccggaagcgagtccggcgctgcctgatatcgcaaagccgaaaaacctgacaggctacgtctatacgaacacgaaatcgagccaaacgggttatgtcaatctcatatgggataaggtgaaaaacgcgaaaggctacaaaatcaacatctacaacggaaaagactatcaatcattcgatgtcggtgataccgatcattggacgacccaaaacaaacacatctggccttcagccgatgaagtgaaagcgggaagattccagcttcacacggacggaaagggcggcgaactggcgcttgacccttcacctgtttacgaaaacgcaaacggcaattacaaagggaagaagaactattccttcacgctgaccgcctatgacgcaaacggtgacagcataccgacggcaccttttaaccctgttttccatgaaggggcggaattcctcggaacggaagaattctggtccattattgacattccggacggacagctgaacggcgcgacgggaaatgtcatcgtcaatgaggaagatatgtcaatcgacggacgcgggccggggctcgggctctcccggaccttcaacagccttgacagctctgaccatatgttcggccaaggctggtatgccgatgcggaaacgtcgatcctttctgaagacggcagagccgtttatattgatgaggacgcgacaacacatgtcttcacgaaaaaatctgacggcacgtatcagccgccgacgggcgtttatctcgaactgacggaaacaagcgatcaatttgtattaaaaacaaaagatcagacgaacgcttatttcagcaaaaaaggcggaaagctccaaaaaatcgttgacggacacaacaacacaaccgtatacgaatataacgacagcaatcagctgacagccataacagacgcatcagggcgcaagctgacatttacctatgatgaaaacggccatgtcacatctattacagggccgaaaaacaaaaagatttcatattcatatgacaaagaccttctcaaaacggtgacggatactgacggcagcgtcacaagctacgactatgatgccgaagggcgcctcgtcaagcagtattccgcaaacagcacggatgacaaaccgctgttcaccgaataccaatacagcggccaccgtctggccaaagccgtcaatgcgaaaaaagaaacgtacgactacagctatgacgcggacaaaaaaacgctgctcatgacgcagccgaacggccgcaaagtgcagtacggctataatgaggcgggcaacccgattcagatgatcaatgatgccgaagggctgaaaatcacgaccaacactgtatacgaaggcaacaacgtcattcaggacaccgatccgaacgacgcggatgcgggcaaagcgacagaaagctatcaatatgataaagacggcaacgtcacagccgtaaaagacaactacggcaccgaaacgtatcagtacaacaaaaacaatgacgtgacgaaaatgaaggataccgaggggaacgtcactgatattgcgtacgacggactggatgccgtttctgaaacggatcaaagcggaaaatcctcatccgccgccgtgtatgacaagtacggaaatctcattcaatcaagcaaagagctggcagcttcggtaagtctgctgaaagacggcagctttgaaggaacaaagctgggctggaatctcaccgctacgagagacagcggaagtattgcatctgtaaaagcaaaaagcggcgcactgtccggacaaaaagcactggagatcacctcacaatccgcttcagccggaacagagcacggccatgcgtccgcaacgcaggaagtgcagcttgagccgaatacgacgtatacactcagcggccagatcaaaacggatctgacaaaggcaagagcgtatttcaacattgatctgcgtgacaaagaccaaaaacgcattcaatggattcacaatgaatcaggcgcattagccggaaagaatgactggacgaaacggcagatcacctttacaacaccggccaatgcaggaaaagccatcgtctatatggaagtggaccataacgacaaggacggcaaaggaaaagcgtggtttgatcaggttcagctggaaaaaggcgaagtctcttcaagctataacccggtgcaaaacagcagtttcacggccaaaacagatggctggagcacaagcggagccgccgctgaccttgatgaaggcttcgatgatgacagctcaataaaagcgtcccgcacaaatgcatcacaagccaatgcggccgcaaaacaaaccgttacattaggccaaagcgcggacgataagccggtatatatcacgctgacaggaatgtccaaggctgacggcgtaaaattaacgaacgacaatgattacgcgcttcaggccggcgtcacatatgcggacggcacgacgggcgtatacaccgccaaattcccgcaggggacacaggaatggaaccgggcggcggcagtcattccgaaaacaaagccgatcaataaaatcgaaatcagcattctgttccaaaaaagcgccacgggaacggcgtggtttgatgatatccgtttaatcgaaggaagcatcctgacgaaaaacacctatgacgaaaaaggaaactacgtcacaaaagaagaagacgaactaggttatgcaagcactgcttcatatgacgagactggcaagaaaacatctgaaaccgacgcgaaaggcgaaacaaccgcctacgaatacgatcaggccgaccagctgacaaagctgaccctgtcaaacggcacatccatccttcacagctatgacaaggaaggaaatgagctgacaaaaacgattcgggccggcgcggaccagacctatcaatatgaatatgacgtcatgggcaagctcgtcaaaacaaccgacccgctcggcaatgtattaaagagtgaatatgacgccaacagcaacttgacgaaaaccgtttccgccaacggaaatgaagtgtcgctgacctatgacggcaccgatcgggttaagtcaaaagcgtataacggcactgaaaaatataactttacctatgacaaaaacggcaatgaaacgtctgtcacaaacaaagaacaaaatataacgaaaaaacgcacctttgacaacaaaaaccgcctgactgaattaaccgaccgcggcggcagccaaagctggacgtatccggctgattcggataagctgaaaactttctcatggagccagggcggccaaaaaggaacaaacagctttacgtacaacaaacttgatcaaatgattgaaatgaaagacggcacttcagcctatacatttgattatgatgaaaacggtaatgtccagacattcatcagcggcaatgaagtcggcacgagtttttcatatgatgagcggaatctcgtcagctctcttcatatcggagcgaaaaacggcggcagcatctttcgggaaagctatgaatatgacgccaacggcaaccgcacggtcatcgacagctcagcgggcggaaaggtgcagtacgaatacggcaagctcaaccagctcgtcaaagaaactcatgaagacggcaacgtcattcaatatacgtacgacggcttcggcaaccggacaaacgtcaccaccacaaaggacggcgcaagcaaatcagtcaacgcatccttcaacatcatgaaccagctgacgaaggtgaatgacgaagacctgtcctatgataaaaacggcaaccgcacatctgacggcaaatacacatatacgtgggacgcggaagacaacctgaccgccgtcacgaaaaaaggcgaagacaagccgttcgcaacatacaaatacgatgaaaaaggaaacagaatccaaaaaaccgtcaacggaaacgtcacaaactacttctacgacggagacagcttgaacgtcctgtatgaaacagacgcagacaacaacgtcacaaaatcatacacgtacggtgacagcggccagctgttatcctatacagagaacggcaagaaatatttctatcactacaacgcacacggtgacgtcatcgccatctcagacagcaccggaaaaaccgttgccaaatatcagtacgatgcgtggggaaatccgacaaaaaccgaagcgagcgacgaagtaaaagacaaccgctaccgctacgcaggctaccaatacgacgaagaaaccggcctgtactatctcatggcccgctactacgagccaagaaacggcgtattcctatcactcgacccagacccgggcagcgacggcgattcactggatcagaatgggtatacttatggaaacaacaacccagtgatgaacgtcgatccggatgggcattgggtgtggcttgtggtaaatgccggatttgcagcctatgatggatataaggcctataaatcaggtaaaggatggagaggtgcagcctgggcagcggcttcgaactttggtcctgggaagttatttaagggtgctagtcgggtttataaagctgctaaaacatataaactatctagaaaaagtgtacgggctagaagggcctactcaagttatagggatataactggaaaaacctctaggttcaaaaattattctactaatgtaagaagaagaacttttgaaaaaaatttaagaagacaaggatggagaaaatcagttcatcatgggggtgttatcactatgacgaaaaatgggaataagtattccctaaggaaacatgctaagtcaagtccttatccaaccgcggaatatacacctaaaggtagaaaaaaattcacacacaaaatcagaatgcgacattaaaggggaaataagatgaatcactattttattgatcatcctaaggagttaaaagtctatcaatccataattaattccttatttcacgtagagcaaacattgcctaaacaagtttttaaacaaaggaaaaattattatttattcgaggaattccattgggtattatctgaagaaagttggggaatgtttaagagtttggctaatgagcatcatgatgagtttatattaatggctgttatagatagttctgaagatacaaaccaattttacgaagaatttgagtattttaactggataaagatccctttgcatataactgcagatgagtatctgtcaatcttaactgattatccaaagcacagtaaaagtgactgtataatgaatattgcatctcgtgttgtttgggcttcaccgactttaaagtgggcgatttatggtgagagagaacttgaaatctgtattctaggtattgatcatcagagtgaaggaaaagaactagcaacttggagatcgttagatgacgttgtcttagattggatatcagttgtattcccaaaccagacggttccagttgaatttgaaaaaacacttacggcacattacaaataaatataagtatatttttaatacctactaccgatatcatctgcttgttctaaacgggattttaaagaatctccagatagtatttttgcattcaacagatatttaatgacaaatatgcagagtaatatatttttggggcttgatgaataatctatgtttatcatcaagacacttctatcaacgggtttgttagtgttagttaggagaagacaatgcacaaacaaattgagaatagatagattatatgtcgattatcagttctttaaaaaagaactattttaaggttcaggttgttaaaaatgtagcatctgtttattttagtgcagatattggtgatatgagattagaaaaaatagatcctgaagaatacaattggcaagtatttgagatgagttaccacccggaaggaatcggaaatctatcaaatgctgtaattcctgagtatcaatcaaatgctaattttctcattgacatgaacagaatgctgattgctgtagaagctgaaacagttcgctttgatgatcaatcattttatgcgtatcattcgaaatcataaataaacaaataagagaggttcccagcctctcttttcttacataacgaaatcgttcgcggaggcaaacatgagcagccctttaaatatacaaaaagaatcattgaaggctatagggaatctggatgtcatatgatctagtgagtaaagatattgaaggccggctgctttctaacagctttattttagttgagccgcccttctcatttgctatctgtttatttcacacagaatacggctgtgagcttgtgtgtaaaccaccgaaaagaggtccaagatgcatcctgcatcccttttttataaagaacacaaaggaatcggcagtcgttcaatctcaaatatattccttatttcatgaagacaaagcgttgcccgaacgagtatttaaacaacgaaaacattattatctattcgaagaattccactgggttttgtctgaagaaggctggggaatgctcaaaagtttggcgcatcatcatcacgatgaatttatcttaatggctgttctggcacaaccggatgatatgaatcggttttacggggaattcggatattttaactggttaaagattcctttatatataaccaaagatgaatatctttcaatcttaactgattatccaaagtacagtaaaaatgacagcataatgaatattgcatcccgcgtcgtatgggcttcaccgactttcaagtgggcgatttacggagagagagaatttgaaatttgtattttaggcattgatcaggagattgcgggaaaaacgttagaatcatggaggccgttagatgatcatgttttggatatcagttgtatgcccggatcagactgttccggatgaatttcaaaaaaagctcaccgcgcattataaatacaaggggcaatgacatgaaaataaaaatgaacaagatacacgatgaatcagtaaaaggatgtttttgtcactttgacaactgcggacgtcagtatcttggtcagcatcagaatggcagtctttcatttacgatcacggaggaatccggcgatacccgagaggttcatatcgatgaacaaattccgtgtgaggatattatgctgttccaacagagttcggctgactggtatgtgttgattttctttgaatcgcatgagtataaagtgaaagtattttcagcagaaggaactgaacaaagtgcattttctctgccttcaggagtttcatgcagtcttttggacgaaaaacaaaacctgtggatcggtttaagtgatgaaggtatttatagtgatgaaaatcctgaagggcacagtgtgctgtgcttcactttagatggacaattaaaggaaacgcatattgatcaacagctttcagaaatatatgcgcccgttgtagatgactgctatgcgcttgcagaaaaagatggactgatctacatgctgtattacgcttatacaatcattgctgcgtttgatgaaaccgacgtgaaacgagtttggattgtttctgataaagcatattccggggtttacgaccagctagcgatttcagatgacgggttttggatatgcaaagatgaacaatcactgtccctcataccggctgatgtcagtctgccgatgcaagaggtgaagtgctgtgatccagacgggcgagagctctcgatacaacagctgaaactaacaagtaatgctatttatgcaatatcagactcggggatctataagagggatatccgagggggaaaatcaaatgaatgaatcatctttttggcagcttattgaccaagctgccaaccaggaagaacctaacgagtggctgtgtaatatattatcggaaaaagataccaatgagatccttgattttgagtttatgattcagactttgattcaaaaaagctaccagtcttccctatgggcagctgcatacattctcatggacggttgctcagacgatacgtttgattattttcgcggctggctaattgctcagggaaaagaaacttttgaaaaagtgcttgatgatcatgagtatttggcagcctacatcacagaagagaagcttgacgaggaaggccatccgcaaaatgaagacttgctgtcagtggcaatcaaggcgttgacatataagaagactagtgacgatgaatggaatgataaagtacacgacgatcttttagatgcacttgaacaaaagggacttgccgaatcggacggtattgaattggattgggaagaagaagatttgactgataggtttccaaaactatgggagcgttttggggataatccgctgggtgatttttaaatagtagaatatgaaagcttgtatcaataagcgatacaagctctttttagatcaaatctgaagggtgaatgacaaagaaaacaagagaatggataatcaatttaaaagaacttgagaaagtgccggcggagggtatgcagctcattcaaaaaagattaatcgaaaaactcgccgattgaagagccaaatcaaagaataactagtcccttgtgcaaaaagagattttagtttattgatctggtcaaagcaagcaattgcttgagctggttttatcaaattcaataccagccgacatccgtgaggttgatgctcccggaaaaatggaagcgaaacatctgatcttgaaaacaactcagcaatatgttgcttgtgatgaccgggacgtcctgctatttcatcaacactgtagcgaagtttgtgcttttggaaaatgtctcgagcaccttgagggcttattggaatgtattgagttcgacgaaggttttcccaatcatagttttatcttggttgagcctgagtgtcagtttggtttatgtatattgcacacggaatatgggtgcgatcttgtatattggtagattgctttcctaggaggaaatctttgtggaaaagcttcaatattatagggtgctttgtatactagaaacaaattagaatatgtggtgatcaaattgagcgagccaaagctaatagaatgcacaaataaaatcaaaagtgtcttaaatgatcaaacaacaagataagaagtgtcagattggtttatgcggataaccccggaatagaagatgatagagtctgggatatgttaatccttcaatgcgggactgatttgaaatattctcctgaaacttatttgcataaacagatgatttaatggaaaaggggcagtcacaatggcggtttacagtgtataaaagatagaaggagagaattaaatgtactatttttatgaaatatcaactctcaatgactatgattgggttgaaaaagagtataaaacaatagaggatttaatatttgttatattaaaaaatgtggaaaataaacaatatgcaatgtattcttactctctttcaaataaagatagtgatacttgtatattctcagcgagcttaaaaacaaatactttgtttaataaaaaaatctcttttatgaaaacctcagcagaagagtacaaaaatacaataattgcgcatgaaaatataattttattggaaaaaggtgttgagttaaaagatatattaaatggagcttctttagcagagaaaacaattattaaagatttactggattatgttctttatcatatagaaataacagattccgagacaatcagaataggatctagacatagagaaaatattataaacattattaaataacgacattaagtaaaaaatagatgagcctgttgagtaagtgggtagggattagaaccgagatagtaaaacgtgaacaatcggtagaacttagcttgaattccagagcgctattcaaatcattactaataaattagaacttttgagtggagtacgaggaggcagcatggctaaaattagagatgattgtctggaacttcaattaacaccaagaaggtatcaagaggcggaggatgatccttttatctcaataatgtaactgttggaacctaataaagtaatcacccgcgattactccgccgctttactagaaagtgaatataaaatgctgatatcagggattgaagcattattagcggggaaacaagacaggatacgtttagaaacaattgaaccattttttattttgagtatagataaagaaaacgaatattacagatttatcattagatttgtggaaaatcacttaaatacaactttctataaagtgaactgtaatgaagagaagctagaacttttcgtgaagactttaaaatcagatctcaaagactccaaaacttcattagggagataaacgatgtacaaaacaataaatgaatgggtagattacatagatggggggtgcgctgtccttcattttgattttcaagtgtttaaaaaagaactttcacttaagattcaggtcgttgaaaataaagccgaatatacgcataacattctttttcaaaatgtagcatctgtttatttcagtgcagatattggtgatatgagattagaaaaaatagatcctgaagaatacaattggcaagtatttgagatgagttaccacccggaaggaatcggaaatctatcaaatgctgtaattcctgagtatcaatcaaatgctaattttctcattgacatgaacagaatgctgattgctatagaagctgaaacagttcgctttgacgaccaatcattttatgcgtatcattcgaaatcataaataaacaaataagagaggttcccagcctctcttttcttacataacgaaatcgttcgcggaggcaaacatgaacactcctttaaatttacaaaaagaatcattgagggctatagggaatctggatgtgattaatccgcttaaatacaattcgatttattcatgtgatctagtgagtaaagatactttttctcaattaatgaatgacttagagttcgaaacagctctaatagaagtaatggcatttccttcttttattgaagaatggaagaagaaggttgaaaagaaaatgatatatatgaatactgtatcgaaaaagttcattcatattgaatgtgccctaaccaaagaagaattgatggcagatcacttattagatgaattatattttttagcatcgatcaatgactttgttgttataatagcaaatcctgccaaaaataagtcctacatgaacctgaacactcaaaaggttgatgtaactactgaaaataatgaaaaaatcatttggtttgaatacgatgcagcagatttatatatcattgattaatttaatataaattccagattcttaatctatggagtggtgttgatgttggaacttaccgcggagcgtgttgggtcatataaaagagagcacatcatctatttcaatgcgggcagggatgatcaagtgtttattgtgtccgtgcacgatcacaaagtaatattggaggttatgaaaggcagctctcttttaatcaaaaaagagttacacggattttctgaagatgcccatttctatttcgttgattcgtatgataacacaatcgttatcgtttacctggaaaatcatacgtgtcaattagccgtatactgcgtaaacagtaataaaatcaatccgatttgttcttttctattaagcgccaatgtatttcatctgggtgaggatggattattatggatcggattaacggacgagggtatgtatgatgagagaaatcctcaaggaaaagcgatatctgcttttcatgcagaagacagaacgttttattttgaagacgattttaaagaaatgatgcatgaatgctatgccgtacaatcgatcaaatctgatttgtatgtatgtttcgagggagaggattgctgtgtcatcgggcattatcagattggacgggacagaattcgtactgttgcagaatatgtgctggacggcgatcaatactcctattgtgatcagctatccgtttcgaaaaaaaggaggcacaaaatggagtggcacaaacatgagaaagcagttctgctggggccggattcgccggattgttttgaattgacggagtttacgttctataccgggtataacgagtattatgataaaatcccggtgtttgagctgaagctgactgatgggcagtatgatgctgtgctgcgttttgagggtgtgagggctgcccggctggatgatcttgaaagcatcaccgacatccatctggatatcagcccggtcgacggcggctgggaatcgatccgctactatgtcgatgacggagaaggaagcatgagcttttattgcgccaaatgggtcgtgcttgacatgaagaaaaagcagtcccccgaatggcccggcaaaacgtcagggtaaagcggcggcatttcgcgtataatgaggggagccggacagagaaggagtttagtcatgaatgagtttaatgaatatgcgatcagccccgagatccgacgggcgctgaatggcttgcaatacaccgagccgactgaagtgcagcggcgcgtcatccccgccgccctgcaaaaaaaagacctcgtcgtcaaatcgcagacgggcagcggcaaaaccgcggctttcggcattccgatctgcgagcttgcggaatgggaggaaaacaaaccgcaggcgctgattttaacgccgacccgcgagcttgcggcgcagattaaagaagatatcacgaatatcggccgtttcaaacggataaaagccacggcggttttcggaaaagcttcttttgacaaacagaaaaccgaactgaagcaaaaaagccacgtcgttgccggaacaccggggcgtgtgcttgatcatatagagaaagggacgctgccgcttgaacggctggcgtatgtagtgattgacgaagcggatgaaatgctgaatatgggatttattgaacaggtggaagccatcattcagcatctgccgaaaaacagagtcactatgctgttttcagcgacgctgccggatgacgtcgagaagctgagccgcacatatatgaaagaccctgaattgattgaagtaaaagcggaaggcctgacgacaaaagacattgagcattttgtcaccagaacagaagaagaggacaaaacatctttgctgcgtgatgtcctgatcaccgaaaacccggacagctgcatcatattctgccggacaaaagaaagagtcatccagttaaccgatgagctggacaggctgggctacccttgcgataaaattcacggcggcatggtgcaggaagaccgctttgacgtcatgaatgaattcaagcgcggcgagttccgctatctcattgcgaccgatgttgccgccagaggaattgatattgaaaacatcagcctcgtcatcaattatgatattccgcttgaaaaagaaagctatgtacaccgcaccggcagaacgggccgcgccggacaccgcggactggccgttacgtttgtgacgccgtctgaatcgcggtttctgaatgacattgagacatatatcggtttccgcatccagaagcgggaggcgccgtctgagaaagaaacagcggaacggaaagcggcttttgcggaaaaattgaacgcccgccccgatgtcaaaacagacaaaagcgaacagttaaacaaagacatcatgaagctgtactttaacggcgggaaaaagaaaaaactcagagcggtcgattttgtcggaacgattgcgaaaatcgacggcgtttcagccgatgatatcgggattatcacgattctggacaacgcatcgtacgtcgagattctgaacggcaaaggcccgcacgttcttgacatcatgaaaaatacgacggtcaaaggcaaaaaactgaaagtccataaagccaagaaataaaaaaaaaagcctgccgcgcgcaggctttttttacgccgtctcctcggggacgaacgcaaggatggcaatgccgatcacaaataacaaaatcaggctgaacacggcggctgacgaatttccggtcagctgggcggtcacggcaatcaaaagagggccgataatcgaagcgaacttgccgaagatattataaaagccgaaaaactcattggcgttctgtttggggacaagcttggcaaagtaagagcggctcagcgcctgaatacctccttgggaagtggcgacaagcatagccaagacccagaaatcaaaagcggaatccataaaataagcatacgtgcagacaatcatatacacgccgattccggcataaagcatcgtttttcctttaaaccgttcggccagccgtccgtacaaaatcgaaaaaggcgcggcgacgacctgtgtgacaaataaaacaatcagcagatttgccgcgctgatgccgaggtcagccccgtatgacgtggacatcgtaatgatggtgccgaccccgtcgatgtaaaagaaataggcgagcagaaacaaaaacagcgcccggtgcttcctgatctgcttcagcgtgccggccagccgtataaaactgctgagtacaagccgcggctccctctcgatataatagcgctggcggacgcggagaaggagcgggatcgaaaacagcccccaccatgccgccgtaattaaaaaggcaatgcggccggcagcctgggcggacagcggaataacctccgcttgggctgaaagaatgacggcaatgctgaggagaaaagggatcgtgctgccgatatagcccagtccaaatcccctggcggacaccatattcatccgctcctttgcggccacatcaacgagaaacgcatcataaaacacattagacccggcaaagccgatcgtggaaatcgtataacaaattaataacagcatccaagattcgccgggaatcaaagccagcgcggctgtgcccgccacaccgatcagaagaaagaaggcaaaaaatcgtttcttgcatcctttgtagtcggcaatcgttcctaagacggggccgagcatcgccaaaataaaagtcgcggcggcaatcgtatagcccaaataagcggtagaatcagccgcgctgacaccgttttccgccgccgcggctttaaaaaacaaggggaaaacagccgtcataataatgaccgaataagctgaattggcccaatcatacagcatccagctgctttcttctttcgaaaaccgtttcatcacacacgctccttcccaaaaaccagttctctgcattatatgcgcctcatcgcatcgttggacaaagatttctgaacggcgttttctgattgacctggagatattgaactagttcaaaggtgtagcaggtaaatggtcaggcgggagggagacagaattgaagattgcgaaagtcattaataataatgtcgtcagtgtgctcaaagaaggcaatcaggaattggtcatcatgggccggggcattccattttagtttccttgtatttattttgttttacattcacatatgacttggttaaggcaggaaaaacctaaattacaatgagcgcggatcatctctgtttgtgctgatggtaatttaggtctttttaagtttcgtttttatcattattctgactgatgttcccttttacagaatcatgtatgatcgataaagaaatcgctttcaaagaaaggggaatgccaacatgttttaccgtatgaaacgagtgctgctgcttcttgtcactggattgtttttgagtttgtgtgcgatcacttctactgcatcagctcaaacaggcggatcgttttttgaaccttttaacagctataactctggattatggcaaaaagcaaatggttactccaatggagatatgttcaactgcacgtggcgtgcaaataatgtgtccgtgacgtcatcaggtgaaatgcgtttggcgctgacaagcccgtcttataacaagtttgattgcggggagaaccgctccgctcaaacctatggctatggactttatgaagtcagaatgaaaccggctaaaaacacagggatcgtttcatcgttcttcacttatacaggtccaacggatggtaccccttgggatgagattgatatcgaatttttaggaaaagacacgacaaaggttcaatttaattattatacaaatggaaagggaaatcatgagaaggttgcggatctcggatttgatgcggccaatgcctatcatacgtatgcgttcgattggcagccaaactctattaaatggtatgtcgatgggcaattaaaacatactgcgacaagccaaatcccgacaacaccgggaaagatcatgatgaacttatggaatgggataggtgtcgatgactggctcggttcctacaatggtgtaaatccgctatacgctcattatgactgggtgcgctatacaaaaaaataatgtaatgtacagaaaaggatttccgccatcggaaatccttttttaattaaaacgaaataatcccaatcaaaagcgccgcaatcgtcaacacaatcgttgtccccacggcccatttaatagtgaatttttgatgatcgccaaagctgacgcctgccattccgaccaatagataggtggatggcacaagcgggctgagcagatgcacaggctgccccagcaaggaggctcttccgatttcagcggcgtctattccgtaagcggaagcggcttcagcgatgatgggaagcacaccgaagtaaaaggcgtcattcgacatgaaaaaggtgaaaggcatgctgatgatcgcagtgatcaacggcagatgcgggcccatggcatcagggatgagggaaacgagagaatgcgccatcgcatcgaccatttttgtgcctgagagaatgcctgtaaatatgcctgccgcaaataccattgagacaacgtttaacgcattacccgcatgtgccgagattcgtttctgctgctctttgacatttggatagttgatcatcaaggcgatggcgaacgcggtcataaaaagaacagggattggcagcaggctggtgatcagcgcggccatcagagcaacagtcagcagcaggttaaaccattggagagcgggacgcttcagcggcgctgcctccggatcagaagacggcgcgtgttcaatcgaaatgatgccgagccgcttccgttctttttttccgaggagataagcaacggcgatcacccagagaatgccggcgatcatagcgggaatcagcggcgtaaaaacttctgacgtgtccaatttcaaggaagccaaaaccctcgccgtcggcccgccccacggaataatattcatgacccccgaaccgagcatcgcaatccccgccagcaccaaacggttcatgccgagccgtttgtaaaggggcagcattgccgcaatcgtaatcatatacgttgttgttccatctccgtccagcgaaatggtcatcgtcagaaccgctgtgccgatggcgatttttaacggatcccctttgacaagcgatagaattttggcaatgaggggatcaaacagacctgagtcaatcataatgccgaaatacaggatggcgaataacagcatgatcccggttggagcgaggtctgtaacgccttgaatcatcatctcgccgagatctttgccaaatccgctgatcagggcaaacacaacaggaacgacaatcaaagcaataagagcggaaagccggttagacataataagatacataaagacaatcatcatcacaaaaccgagtatggcaagcacgatatgacctcccctgttcaacagctgtaatagtaagcgctttcacgatttatttctgtgaaaatggcttatttcaaaatgtgtatgaccgcatatgtaaatacagacctaaaatcctaatgagcggatcagcagtttatatgaagaacgccgcgggtaaatgtgctgtagaatgtttcgttttaaaagggggaactgacatgagtgatgatcaaaacaaacgagtaaatgaacactcaaaggacgaacagctggagcagtaccggtctgataacagcggcaaaaaaatgacgaccaatcaggggcttcgcgtgtctgaggatgagcattctttaaaagcgggcgtccgcggccccacgctgatggaggattttcattttcgtgaaaaaatgacgcactttgaccacgagcgtattccggaacgggtcgttcatgcgcgcgggtacggcgttcatgggcattttcaggtgtacgaaccgatgacggaatatacacgggcgaaatttttgcaggacccgtccgtcaaaacgcctgttttcgtccgtttctcaacagtggcgggctccaaggggtcagccgacaccgtccgtgacgccaggggatttgcgacgaagttttatactgaagaagggaactatgacctcgtcggaaacaatattccggtgttcttcattcaggacgcgatcaaattcccggatctcgttcacgccataaaaccggaaccgcacaatgaaatgccgcaggccgcgacggctcatgatacgttctgggattttgtcgctaataaccctgagtcggctcacatggtcatgtggacgatgtctgaccgcggcatcccgcgaagctatcggatgatggagggcttcggcgtgcatacgttccgtttcgtcaacgagaaaggaaaagcgcgctttgtaaaattccactggaaacctgtgctcggcgttcattccctcgtatgggatgaagcgcagaaaattgccgggaaagatcccgatttcaatcgccgcgacctgtgggaaacgattgaaaacggcggcaaagtcgagtatgagctcggtgttcagatgatagacgaagaagacgagttcaaatttgattttgatatccttgatccgacaaaactgtggccggaagaattggttcccgtcaagctgatcggaaaaatgacccttgaccgtaatcaggacaatgtctttgcggaaacagaacaggtcgcctttcacccgggaaatgtcgtgccgggcattgatttcaccaatgatccgcttcttcaaggccggcttttctcttatacggatacacagctcatccgtcttggcgggccgaattttcacgagattccgatcaaccggccggtctgcccgttccataacaaccaatacgacggctaccaccggatgacgattaataagggtcctgtcgcctatcataaaaattccctgcagaacaatgatccgtcgccggcctcagaagaagaaggcggatacgttcattaccaggaaaaagtagaaggcagaaaaatccgccagcgcagcgagagcttcaatgactatttttctcaggccaagatgttctggaacagcatgtctcccgccgagaaagaacatatcatctccgcgttctgttttgaagtcggaaaagtgaacagcaaggatgtgcagcagcaggtggttgatgtcttcagtcatgtcgacgccgggcttgccgagcgtgttgcgaaaggaattggcgtgaacccgccgccgaaggaccgtgaatctgatgaaacgttcacttccccggccttaagccaggaaaacacggtgaagacggcagcgacaaggcaggttgcggttttaaccgaccacgggttttctgatgagaaagtcaaacaagtgcttgacgcatgcaaacaggcgggagtcagagccgatatcatcagtcccgcgctgggaaccatcaagggagaaaacggtacggagctggaagcgtcagccactttcctgacagcggattccgtcctgtacgacgctgttttcattccgggcggaaaacaaagcacagacagcctcaaagcccaaaaatcggccagagactttgtcagcgaagccttcagccattacaaagcgatcggcgcctccggtgaaggaaaagaacttctcgccctcgccgccggaaccgaaagcggccccggtcttgttccggacggaaactgcgaacaatttctgaaagccgtggctgagcatcggcattgggacagaaacatataagaatgaaaaagcgccttttatgagaggggcgcttttttcttgtgaaagtgaaatatctgaggagaaaacgaaaattgcttccgtgcaaatccgtaccttccgctgtccgggacattcagacaacagttttagagagtcagggcattgcattatttaaagggttttgactgatggtgaaatgatctttggtttacttccgctctgtgtttgtgtatcttaggggtagattttctggaggagcgaatgatagtgaagccgtttaccgaaaaacaactcgaagaatattaccggcgtgacgaaaacatgatgattttggtgtttgcccaatggtgcgtcaatcatgaccttgatccgatggccatttacagcaaggcttatcccggacagcctttaaacgaagagctgcgaaaaacggctgaagagcttgtcgtgccgaaggaggaatcagaaccgattcctgatcaaaccgttatcggcgtattggagatgttcggcaactccgatttggcggaagccgtttatgaagccattgcgcaaagaccttcacggtaaaagaggcgtggattttccatgcctcttttttttatggagaaaatgtgaaagaaggcccagaaacaatttgctgatccgcgctgtctatagagtgtaacccgttttcaaaaagggaacggtaatgaaaaggaggagttgtgatgaaaaaggcattcaaaatgatggcggccgtgctcttaactgtgctggcagccgcgccgttcggaggtttcgcgccttcagccgaggccgcgcaaaccgcaaagcccgttgtcaaaagccatacgtataagcatgtaaaacagctgacataccccgaggtcacaaatacgggaaacgcatcttttgaaaagaaaatcaatcaggacttcaagcgctatattgaacaatcgtaccaagaatatgtaaaaaacaaaaaagacggtgaaaaacaaggctacaaagcggaataccaggcagatttcaaggtgaagtataatcaagacggcaagctcagcattcagacggaagactacagttacacaggcggcgcacacgggctgacatccgttcagacctttaattacgacttgaccgcaaaaaaacgggtcacactcgataatgtgctgaatacaaaaacgaaagctaacaagacgagagactatctttacggctacatcaagaaacatgacgatctgtttgaccaggacgtcaaaaaacaagagatcatcctgaataacgaaagacctttcttctttacgaaaaacggcattgccgttgtgttcggacaatatgacctcggaccgtacgcggcaggaatccgggacgttttcgtacctgcatccgtctatcaataaaaaaaagcgatatcactccaaaacggagcggtatcgcttttttcttttaccagacaaacaatccgacaatcgccgcgctcaataaggaaacggcaattccgctgacaagcagcttccagacgttttttccgatgatggctgacttttcaccatcaagcagagattgataagatccgtagatcataccgatggtgctgaagtttgcgaatgatgtcaggaatgtcgtagccacggcaatcgtgtgcggcggaagtgaattcagctgccctttcagatcggccattgccacaaattcattcgtcgcgagcttgatgcccatcagctgtgcgacatacatcgcgtcatgtccgcctaatccgagaaggaaggcaaacggactgaagatgtatgagaaaatcttttgaatggtcaaaccgtgcacgaacagtccgagtactccgtttaacgcggccgttaacgccacatagccgattaccatcgctaaaatgacaatgaccatgttcatgccgacaagcatactgttagaaatcgtggagaaaaagtcttttttctccgcttttgaaggaacgtaaataatatcatcctctttagaaacgtccacgggattcagcatattggcgattaaaagggcgtttaagcaattcagcgggatggctgtaaacacataagtggacggaaccatcgtcaagtacgatccgatgatcgagccgctgatgctgctcatgctcatcagcccgaatgtcagaagccggttgttgctgacggcggcaagctgctggcggatgacggctaaagcttccgtatttcctaaaaacatcatctggatggagaaaaagctctccagtttcggcagacgggatattttagaaatcagccagccgattttatcaatgagccacggcagaataccgaaatacgacagcatatcaaagaaggtcacgacgaagataatcggcagcaatgcgctgaagaaaaaatcaaccgtcgggttcgccatgacagacggaaaagcgaacgcaatcccttgactggcgcaggaaatcagccatgtaaagaacgcgccgatcttcccgatgacaaagccgccgatttttgtccctaacataaaccaagtaatcagaaactcaaagacgaggagcatgacaatcggacgccatttaatcttcttcttgttgggagagcataagaaaacaacagccatgacaacaatgagaccgacaatgttcaataaaaagtacatgtgagcaactcctataagggtattatggaaataaaaaaagctcttattcgtcacaaattcctgaaagccagaaagtgtgataaataagagccaaaagaaaagaatagacagcgtcatatgcttttcactcgttcaaatttatgcaaactttcttgtagtctagtcttttacggcactaggtagaaacaatcagaccatattactgatcatatacaagaataacgatattacatgagatagcagtattttatcgtttcaatttttgaaaatcaacctttttagatattttcaaaataataaatttatattataaataaagaaaataaaggatgtctataagtaattggataataaaggtataaaacaccctcaaaaaacgttccggttcattgtaaagacgggatgcagctgataaaatggatctgagggcacagccttcaaaagacggcagaaaaggggtcattttcgtgatcatccaattcattcgttacagataatgagaggtatagataaataggtaaaaccttccaatttagcaaggtttatttgtctatgcctttttcatttcatcggaataacgaatgaatgaggtgttttttttgacgtctataaaaagaaaacgcgcggaattactgcaatcatgccaatccgtgttcaggtgtccgctatgccggtcggccatggcggtctcacgataccgaagcttgatttgcggacaggggcatacatttgatatatcaaagcagggatatgtgaatttcctcaataaatcggtcaaaacccgctatgacaggcagctgttcgaagcgagacgcgagctttttgacagccgggaattttttgctccggttcaaaaggagatcgccgccatcatcacccatattcaacctccgcaaaaaccggcggcgatattggatgcgggatgcggagaaggctctcatttagccgccgtatgcaaattgcttcagcccgctttttccgtgacgggaatcggcattgatctctcgaaagaaggtgtgctgcatgccgcaaaggccttcgggaatcatttggtttttgccgtcgctgatgtggcggatgcgccgtttgccgacagctgttttgatgtcgtgatgtctgttttatcaccttggaattacaaggaatgcagcaggcttttacgaaagggcggcacagtcattaaagcggtgccgcggcgtgattatttgaaggaagtaagggaattcttcttcggagacagccctcggcggaatgacaccgccgattctgcggccggacgattccaagcgggctttcaaacctttgagcgcaaacggctgtgttacacgaagaccttagcgcagcctgacctcgagcggcttgtgaaaatgacgcccttaacatggaaatgtactgatgacagcatccggcggttcatcagccggaaagaggctgctgtcacgatagatatcgatattttaatcggaaccgatccgctgtaaaacggaaaagacacgctaatcgcgtgtctttttttttatttccagacttcaccggcaatgttgacgacatggcgcagtttcgcccattgctgttcttctgtgatcaggtttccttcctcagtggaggcgaatccgcattgcgggctgaggcaaagctggtccaggctgacatattgtgaagcttcttcaatccggcgtttaatcgcgtccttgtcttcaagttcgccatgtttcgacgtaatcaagccaagcacaagctgaagatcagagcgtttgacataacggagcggttcaaagccgccggagcgggaatcatcatattccaagaacaatccgtcaaggtcaagcccgtcaaaaatcgtttcagccgctgcatcatagccgccttcagccgtccatgtggattggaagttgccgcggcagatatgcatcgtaaccttcagatcgtcagggcggtccttgatggcgtcattaatggaagcggcaaacagcttgcgcagttcatccggcgtcgtgccgaaagcttcaatctgacgaagccccgcttctgataagaaaacggcccatgcggtgtcatcgagctgaagatagcggcacccggcgtcatagaaagcttgaatcgcttttttatacgcttttgacacatcgtgctgaaattgtttgtaatcattctggtaggacgctttttccaattttccgcggaaaaacagcatattcggactgggaatggtcattttcggaacagcatcgccggcaatgctgtgcaggaatttataatcttcgagcatcggatgctgagaaaaatcgatatctcccgttactttaatgccgcgcgctttcgtctgtacgttgtgaaactgaatgccgctttcaggcgtaaacgcttcaacgccgtctaaattttcgagaaagtcaaaatgccaccaggcccggcggaattcgccgtcagtcacgacattgaggccggtttctttctgctttttcacactgcggatgatttctctgttttcgatttcgcgcagctgttctgccgaaatctcacccgccgctctttgcaggcgggcttgcttcacagccgacggccgcagcaggcttccgacctgatccgcgcgaaacggcgggttttttcttagaagcgtatgcaatggttgttctgtgttttgctgtgacatgaacgattccttctttcctgatgaaatataaaaaaactcttccctcggatagggaagagcttgcgtccgcaaatctcaaccttatcttcaggatttagcaccattctgctgaacagcggttgccgggtatcatagggccagtccctccacctctcttgataaggaaatatgctatttttcagaataaactgtaatactcttaatcttagtatgttttctcatattgtcaatatatttcgataaatatttttatttatcaccctcaaatagaatcatatctatcacaatggcgatcgcgagacaaagaacgatatcctcttccttttcaatctgcaaatgataggaatcgccccagctcatccatgatttggtgacggtcatctggtttgattttccgtctgtcacttgaaaattccggccccacacatcgccggtaagatcccagccgagtccggaaatttcaaatttcggtttgaaaaacgtgactttcttgatgacttggcagacgggtttgccgctgacggaaatctcgtaacggggaacgagcgacatcagtttctgattgacgctggcgagcgtgcggccgtccaaatcagtcagcttcagttcatcaccgaatgaaaacagctttccttcaacattgtagatttcttttccgctttcaagaaacacttgaaaacgattcttaaacgtcaacattcgctctttgatgtaaaaatggtacataaaaaaactccttttttatgttgtacgaaaaaaggaggcggatggtttcatatcggccgggtacataaaaaaaggctgccgattttgcggcagctgtcgtttttatgatagcggcatccggcgtttttgacggatcgcatttaaatcaatgatgttattcgtgtcggcagctgtcaccagcgggcttgtctttggcgttttccggcggttgtccttactgaaagagaaaacaagataccctgtcaaagcagcaaaaataagtagcatcattttacatacctcccaaaaaaagttttggtattattattgtacgaaaaaacaaacgaaaagtattcaaacaattgtcacttttttaaaaaataacgtcattttccgtaaaaataactatgggttgaagaaattttgctcttgttgtggttctatagattgtatcggctgatgaatgatgatcgtttatataactttttcactattttttgtaagtgtctaaataactacttcagtgttttcgtttgccttgtgttattcagtaccctaaaaaaccttataatatgcaaaataactgcttctaacagatgactgctagttgacagcgctttctttatttttttaaagaaaacgagatgttatcttaaaaaaatcgtttgaacattttccgcagttttttaaaagggtttgattttgtctccagaacacgcgggtcttttaaggtttttttcaattctttcgctacagtccctcttgccatagtcttcactccttctttccaattcataccttatatacggaaagaaagaaggaaaggtttcatgtgaaagaaaaaaaccaaagcatggggctttggttttaagcgcgctcttcaaagagcctggcgatttcaacaatgacgtttaccgccttttccatatgatcgacggaaatgtattcatattttccgtggaagttttggccgcccgtaaaaatgttcggtgtcggcagtcccatgtaagagagctgtgatccgtcggttccgccccggatcggctcgataatcggttcgatgtcgaggtttttcatggcttgataggcgacatcgactatctctttgaccggttcgattttttctctcatgttgtaatattgatcacgcagttcaagcttgatgctttcgttgccgtatttggccgccagcgcatcggcggttttctgcatatattcttttcgttctgcaaagcggtctctgtcaaagtctctgatgatgtacgacagggcggcttcagaaacgtctccgttcatggaaagtagatgatagaagccttcatacccttccgtatattccggcgcttcttctttcggcagcgcgtggtgaaattccatcgcgatttttgaagcgttgaccattttgtttttcgccgttccggggtggacgctttttccgtaacaagtaagctttgcggccgctgcgttaaagctttcatattgcagttcgccgagtgggcctccgtctatcgtgtaggcgaatgcggcgttgaagcggccgacatcgaatttgtgagggcctctgccgatttcttcatcaggcgtgaacgcgacccggatcgttccgtgtttgatgtccggatgtttgatcaagtacgccattgccgtcatgatttcggcaatgcccgctttgttgtcggctccgagcagcgtcgtgccgtctgttgtgatcagcgtctggcctttatagcgggagagctccgggaattgctcaggcgacaggacgacattgagtttgtcattcagaacgatatcatgtccgtcgtagctctcaataatctgaggattcacattttttccggtaaaatcggtcgcggtgtccacgtgagccagaaaaccgacagtcggcacgtctttatccgtattcgccggcagagtcgccatgacgtacccattgtcatcgactgtgatgtctgtcatgccgatcgactttaattcatctgccagcatgttggccaatgtcagctggccgggggttgaagggcagttttcattgttttcgtcagactgtgtatcgacttttacataagaggtaaagcgttcaatgatttcatttttcataccgtcatctcctttgtcttatcttaccatgcgcgggggagggatttctatttcgcaaccgttttgaatcgagggctctgttttttacgcgaatgaaaataaattatgaagaaacgatgactaaacgattaaactttttggaaatggatgattgaggaaggaaaaaccgatataatatggtcaattcattcaataggggaggctttcttcatggcgattttagtgacaggcggagcgggttatatcggaagccacacatgtgtcgagctgttaaacggcggctatgacatcgtggttttggataatctgtcaaatagttcaccggaagcattggagcgtgtgaaagacattaccggaaaagggcttgtgttttatgaagcggatctccttgaccgtgacgccgttcaccgggtgtttgctgaaaatgagattgaagccgtcattcattttgcgggattaaaagctgtcggtgagtctgtggctgttccgctccgttattatcataataatctgacgggtacgtttattttatgtgaagccatgcaggcacacggtgtgaaaaagatcgtcttcagttcttcagcgacggtttacggcgttccggaaacaacgccgatcactgaggattttccattaagcgcgaccaatccttacgggcagacaaagctgatgctggaacagattttacgcgatctgcataaagcggactctgaatggagcattgcgctgctccgttactttaatccgttcggcgcgcacccgagcgggcggatcggagaagacccgaacggcatcccgaataatttaatgccgtacgtcgcacaagtcgctgtcggcaagcttgagcaattgcaggtgttcggcaatgattatccgacaaaggacggcaccggtgtgcgggattacatccatgtcgttgaccttgccgagggccacgtcaaagcgcttgagaaggtgctgaacacaacaggcgcggatgcctataatctcggcacgggaagaggctacagtgttattgagatggtcaaggcgtttgaaaaagtatcaggaaaagaagtgccgtaccgttttgccgcccggcgcccgggagacatcgccgcatgcttcgcagacccggcaaaagcgaaggctgaattaggctgggaagcaaagcgcgggcttgaagaaatgtgcgccgactcttggaagtggcagtcctccaatgtgaacgggtaccaaaaggtgtaaaaagaaagagaccttcaaatgatgaaggtctcttttgttatgatcattatttaacttttacttcaacatcgttgctgaattttattttccaagtgcctttagagtatgcgtttttatcaacttcaaaggctttcactccagtgaccttaatgttcgggttcaagtcacttaaaattttactgttgttcacttttgtttccgttgcataagtcgatgaagcgtcaatatccggatcataggaagttccttcagaatctactaatttcacgctcggaatggagaaagagctaataggcttctttgaaacatttttaactgtgtattgtacagctacgataacgccgccgtcagacgcttttttctggatatattgtgtccctactgagtctcttttttctacttttgtaagagtcacttcagttttttcagtcttaacagtgtcaccgatgttatacagtttttctttagattccgcagaacttgaagatgcaaccttagatgatgaagaatcgcctccgccgccgatgtttacgagaatgataataaccactactgccagaagcaatgtgagaattttatgtctcataaaaaagtttctctgatctttaccgcagtttgggcattttttaacgcctttagcgatttctttgccgcatgccttacaagacactaggttgcctgccataatatttcctcctatgtaaactatttcttgaaaactacatactataatgcctgtaaaataacctatagtcaatgatattttgagaaaaaagtattttaatgattttttagtcatgtattttaaggaccttttttagtatcggcagatcgttccaattttttatatgtttaatgaaaaaaagagtggttgaacatgttcgtgatttcccgtataatcttgaaagatatacaaaaactgaacataaaaaacagtggttttctagggttccgcaatgctgaattggtctggaccgagagaaaacacacagcaggttcctgctgtgacacgttgggataaaagcccgggagtttctgctcttttaatgaagagtgctctcccgggcttttttgattttatataaagggagtgtctgggatgaaaaagagattgttggatgtgctgatgctgattattggggcttttatctttgctttggccgttaatttattcgccattccgaatgatcttggagagggcggggtaacgggaatcaccctgattttatactatgtgtttgaatggtcgcccggggtgacgaatatcattttgaacgggatcttattgattatcggatataaatttttagacggaaaaacaacgctttatacgatcattaccgttgtcgccaattcactgtttctgcatctgacgcatgattggcactcgccttcacatgaactcattattaatactatttttgcgggtgtgtttgccggtgtcggaatcgggatcattattcgagtcggaggaacgactgcgggttctgccattttggcgaggattgcgaacaaatatctcgattggaatatcagctatgcgcttttgttctttgatctgattgtcgtcttcagttcttatttcatcatcggtgcggaaaaaatgatgtttaccattgtcatgctgtacatcggaacgaaggtgatggactttatcattgaaggtctgaatacgaaaaaagcggtgacgattatatctgagcataagcacgaaatcgctgaacaggttaacacgcttatggacagaggggttacgctgctgtcgggtaaaggaaattacacggggcagtcgaaggaaattttatatatcgtcatccagaaacaagagctttccatgctcaaaaaaattattaaaagctgtgatacaaaagcgtttgtcattgttcatgatgtgcgtgacgtctttggtgaaggcttcgtcgatatctctaaataaaaaggatccctctgccggcgcggagggttttttcttatgccggcagaagctgttatgatccgtttcccgggaaatagcctgaaagctgtttcttaaaacgaagtggatacaatcggccggacgttttatactgaaaatatgatagagcgatagagaggagcgcatatgaacccgttattggcaatttacccgagggctgtgttgtctgatacgtgctgtacggcggaggatgtcttttgcttttatgatgagaaaaggcgggtctatgtcaccattccgaaggaggatattaccccgaaggagaaactgcttctggaatcatttttgacgcccgctgaagaaaaaggcgttttttttccggagacggcggcagcaaagaggtggcggcggtttctgctggaagagggtccggtgcctgatgtcaaggagcctcgtgtccgttttatccattatgacttattgagagaacgggactggggggcatttacggaagcgctgcgccatttctggccggtttcatatacagttgtccggacgggaagggatcaaggcgtgattgtggaggaagaaaagctggaagcgccagattcggatgacatcgcatcttttgtgaaaattctcgaaggcgatttttatttcagtgtccgttttttcatcggaaggtattactgcaagggagaacgtctgcgccttcattatcggagagaacagcaatattgtcagattggccggcgtcatctcccgcagctgagcacgctgaccgcggaaacggtatttccggccatgctcacggaagaaaacagagaaaagctctcagccttgcttcacgaagaagcggcgctgctgtttcagaaagaaccggagctgaagcatacgattcagacttttattgaacataactcgaacatgtcgctcacatcgaaaagactgcatttgcaccgcaacagtcttcaatatcggattgataaatttgcggaacgctcaggtattgatattaagacatatcggggcgccctgctggcttatttcatttgtctgcagtatgaaaaatcacattaaatgggaaatgtgcacgaaggcagcggactttttttatgaacattgcctatatccgccgccgcctgacgctgttacaatcctatttaagaaagcgtttacaaaaaaggggagatgacatggcggaacttcggctggagcatatttataagtattacgatcaaaaagaagcggctgtcgatgattttaaccttcatattaaagataaagagtttatcgtgtttgtcggtccgtcgggttgcggcaagtcgacaacattgcggatggttgccgggctggaggatattacgaagggtgatttctatatcggtgacacgagagtgaatgacatcgctcctaaagacagggatatcgccatggtgtttcaaaactatgcgttatatccgcacatgacggtctatgataatatcgctttcggtctgaagctgaggaagatgccgaaacctgagataaaaaaacgggtcgaagaagcggcgaaaatgctggggctcacagagtatctgcaccgcaaaccgaaagcgctctccggcgggcagcggcagcgggttgcattaggacgggcgattgtcagggatgccaaagtgttcttaatggatgagccgctgtcaaatctggacgcaaagcttcgggtgcagatgcgggcagaaattattaagctgcatcaaaggctgcaaacaaccacaatctatgtgacgcacgaccaaacagaagcactgacgatggcgacacgcatcgtagtcatgaaggacggaaaaattcagcagatcggcaccccgaaagacgtgtatgaacatccggaaaacgtatttgtcggcgggttcatcggctccccggcgatgaactttttcaaaggaaagctgacggacggcgccattcagatcggttcagccgctctcagcgtgccggaagggaaaatgaaaatgctacgggaaaaagggtatgccggcaaagatgttatcttcggcatccgcccggaagacatacatgacgagctgattgtggtggaatcctataagaattcatccatcacagctaaaattaatgtcgcggaattgctcgggtcagaaattatggtctattcccggatcggggatcaggattttatcgcccggattgacgcccgccatgacatacgtgccggtgaagaattgaccgtcgctttcgacatgaataaggctcacttttttgacagtgaaacagaaatcagaatccgctcataacgcaaagccggacagctggatgtccggcttttttgatgtaacaatttatgacgcataaccgatataaaaagtaaatagaagacagaaagcaggaaaacgatgaaacgcatgatcaggtgcatgtgccttttggctgccgtgtttacgcttgccgcttgctcgggccatgaggcaagcgccgaacaaagcattccgaaggcagaagcgcaccacgataaaaaatctgtaaagcgccaaatcaaaaaagagccggatacgtccgcctgggttcaaacgaaaggaacggcaagactgccgattctgatgtaccacagcatttctgagggaaacagcctgcgtgtgccgaaggaagaattccggcagcatatgaagtggcttcatgatcacggctattatacgatgactcctgaagaggcctatctgatgctgacggaggataaggagccgcgtgaaaaatgtgttctgatcacatttgatgacggctataccgacaatgtgaaagcggcctatcccattttaaagaaatacaagatgaaagcgacaatctttatgatcggaaactttatcgggcataagcatcatctgactgagaagcagatgaaggagatggccgcccacggcatttccattcagagccatacgatgaaccatctcgaattgaacgggctcacaccgcagcagcagcgacgtgaaatgaaggactctaagcgtttatttgatcaaatgttcgggcagcggacgtctatgatcagctaccctgtcggacgatataataaggaaacattaaaagccgccgccgcgtcaggctaccgtatggcggtcacgacggagccgggagcggcgtcaagagatcaggggctttacgggcttcaccgcgtccgtgtgtcgccgggcatgtccggcgcggcattcggctcttatattcaaaatgtgatgaaataacagagcctccgcatatgcggaggcttttttcagtttaatagaattgatgaagcagcagaagggtgacactcacggtaatcgctccgccgatcctggtcgacacttgggcgaacggcataagctcaagccgttcagcggcgctcaagatcgcgacgtcgccggtgccgccctggccggaatggcaggcattaataattgccgtctcaatcggatacagattcatccattttccggtcagaaaaccgacggccatcatcgtgacgacgattgataaaatggtaatgatgttgctgatcgtaaacgccgcaatcagcttgtcccacggtgtcattgaaacgccgatcgcaaataagagcggataggtcacggctgtcgagaaaaagcgcgagacgccgaaggctccgttttcaatcgaagccggcgccagcctgaacagcttaatgagaacggcaaggacgagcatcacgacaggagccggaagctgaaagaaatcatgcgccagcatgccgaccaaatagagggaaaccgctaaaatgccgcccgaagcgaaaaaggacaaatcaaacgttttatcattggccggctgttccaatgcgggagcggaatgatcagacttatcaaccttcccgttgcccgtccattccggtttgcgtttcccgatgacattcagcaaacccgataacataatggcgcacaggctgccgagcatgatggacggcagcacaagcgcaaaggcgtctccctgggacatcggcataatatcggagtagccgatggataaaggaatcgcgccttcaccgacaccccccgccataatcggaacgacaatataaagcagcgtgtgctgaaagccgagcccgagcagcgtcccgacgcataagccgacgatggcggccgcgatcgagccggcgatcagcggaataaaaatcttgacgaaagctttgacgagcgtctctcttttcatcccgagaatactgccgacgacgataccggcaataaatagatagagaaagttggagctttccgtgaattttgttgttgaagtaataatgtctttcggaagcaggtggtagtagacgacagcggatggaataaaggttgcgagaatcgcagggccgccgatggaccgcacgatcggaatggattttccgatctggccgaaggtaaatccgaaaaaactcatgacggcaattgatgtcagaatgtcgctttttacatcacggctcatgacaaacaccgtaataagcaaaaaaagcaggatataaataggaagaggaataatgccgattcttatattcattgctctggcaaaccagttatcagtccgttcctgtttttggattgaatccgtttgcaattttggttgaagttctcccatgcttgttcccccagtcgttatgtagtgaaaaaatatccccatttaaagtatactaaaaaatttaaattgttaatatattatgaatttactagaggacatgttttcttcacattttctttctcgaaatggcgatttggcgggctttttcaccgagaaaagcattttgttcgccacacgaataaaaaagaggtacgatatcaaagggacaaatatcctaggtgctgacataaaatctctacaaatccgacaataatcggtcacaatttcagccttattttaggtatattgatctttttttttaggctgaatcgttgtaaagtaatgatattgaatcatttctatgacagccgctgtcccccggggtgtacaggctgatatttcaatagttttgacgaatttgtgaaacattgagcaaatatatcattttttgtgaaataccgagcaatgatttcgctatgtttgtgaaatgttgagcaatttaccagattggaggaaaaacatcatgagtgagttggtattagcccgcattcaatttgcatctacaacattgtttcacttcttgtttgtgcctttgtctatcgggcttgtgtttatggttgctttgatggagacgctttatgttgtcaaaaaacaagagacctatctcaaaatggctaaattttgggggcatctctttttaattaacttcgctgtcggcgtcgtcacagggattcttcaggaattccagttcggattgaactggtctgattattcccgttttgtcggagacgtatttggtgctccgcttgcggttgaagcgcttttggcgttttttatggagtctatttttatcggattatggattttcggctgggaccgtttatctaaaaaagtgcatttgctttgcatttggcttgtgtccttcggaacgattatgtcatctttctggattttgacggcaaactcattcatgcaggagccggtcggctttgcgattaaaaacggccgcgcggaaatgaatgatttcggggcgcttctgacaaaccctcagctttgggttgaattccctcacgtcattttcggggcgcttgcgacgggtgctttctttatcgccggtgtcagcgcatttaaattattgaagaaaaaagaagtgcctttcttccataaatctttcaagctttcgatgattgtcggtctgatcgccggtatcggcgttgcgttcagcggacatatgcaggctgagcatttaatggaatcgcagccgatgaaaatggctgccagtgaagcgctttgggatgacagcggtgatcctgccgcgtggacggcttttgcaaatattgatacgaataaagaaaaaaacacatcagaaatttcaattccttacgcactcagctacttggcttaccagaagttcagcggcagtgtgaaagggatgaaaacacttcaaaaagaatacgaaaaaacgtacggaaaaggcgactatatcccgcctgttaaaacgacgttctggagtttccgcattatggcgggagcgggcgcgcttatgatttttgccgcgattgccggttttattctgaaccgccgcaaaaagcttcatacgagcaagtggtatttacggggcatgatcgcactgatcgcattcccattcattgcgaactctgccggttggattatgactgaaatcggccgccagccgtggacggtcatggggcaattgacgaccgcacaatccgtttctcctaacgtaacgacgggatctctgctgttttcaattatcagcttcggcgtcatgtacttgattttaggcgcgctgcttgttttcctattcgttcgtgaaattaaaaaaggtgcggaccatgatgatcataaggatgttcctgtgtcaacggatccgttcagtcaggaggtctaccatggggtcacttcatgatctttggtttatactcgtttcagttttgtttgtcggatttttctttttagagggttttgatttcggtgtcggcatttcgacccgatttcttggccataatgaattagaacgcagagtgctggttaacaccatcggcccgttctgggatgcgaatgaggtgtggcttatcacaggtacgggagcgatcttcgcggcattcccgaactggtatgcgacgatgctgagcggatattacattccgtttatcatcattcttcttgccttgatggggcgcggcgtggcatttgaattccgcggccaagtgaataatctgaaatgggtcaaaacatgggactgggtgattttcttcggcagccttatcccgccatttgtattcggacttattttcacaagcttgttccgcggtgtgccgattgacggtcatatgaacattcacgcaggtttttcagatattgtgaatgtgtattccgttcttggcggagcagccgtcacccttctttcattcctgcacggtttaatgtttatcaccctgcgcacgatcggtgatttacaagagcgtgcgagaaaaatggcaaaacgcgtaatcggtgttatctttcttgttgtacttgctttctttgcgatgtctgcatacgatacggatatgtttacacgccgggcaaacatcacgattccggtattcgtgctgattgtcatctgcaacgttcttgccgttgtgttcatgagcaagaaaaaagacggctgggcattcggtatgaccggcgcgggtcttgctttgacagttgcgatgatttttatctctctgttcccgcgcgtcatggtcagctcgctgacaagcgcgtatgacttaacagtagctaacgcgtcttccggtgattattcacttaaggtcatgacaattgtcgcactgactctgctgccgtttgttatcggcagtcagatctggagctattatgtcttccggaaacgcgtcagccataaggagcctatgacttattaatgggaaaagacctgtttctttataaaggaatgaagcggattcttgcgatcattacgggattaacgattatacaaacggccgccatcatcttgcaggcggaatggctgagccaggcggtaaccggattatttaacgggaagcggattgcttctctttatccggttatcggctttttcctgcttgcgtttttggtccggcatgcggtgacaacggtccggcagaaaatcgtgtaccaatatgctgcgcaaaccggcgcagacttaagaaaaagatttcttgagcaattgttccgtctcggcccccgctttgcgaaaaaagaggggacgggccggatggtgacgctggcgatggaaggcatcagccagttccgccgttatttagagctgtttctgccgaaaatggtcagcatggcgattgtgccggcggccgttgttatttacgtgttttttcaggataaaacatcggcattgattttgattcttgcgcttccgattttgattgtatttatgattctgctcggacttgtcgcacagaaaaaagccgatcgccaatggaagtcctatcagacgctttccaatcatttcgtggattcgctccgcggactggagacattgcggtttttaggattaagcaaatcacacagtgaaaacatctttcatgtcagtgagagataccgcaaggcgacgatgagcacgctccgggtcgcgtttttatcatcattcgccctggatttctttacgatgctgtcggtggcgacagtggcggtgtttctcggcttgcggctgatagacggacaaattctgctcgggccggcattgaccgcgctcattcttgcgcctgaatattttctcccggtccgcgaagtgggaaatgattaccacgcgacgttaaacgggcaggaggcggggaaaaccattcaagcgattttggcgcagcccggttttaaagaagaaaagccgctcgaacttgatacgtggactgaccgggatgaattacagcttacgcgtttgtccgtccgggaatcgatgtctgaatttcatctgtcctttaaagggaagaagaaaatcggaattatcggggaaagcggtgcgggaaaatcgacactcattgatgtgctgggcggctttttagagcctgcgtccggtgagatcaaggtaaacggtgaatcccgctggcatctgcagtcggacggctggcagaagcagctgctctatattccgcagcatccgtacatttttgatgacacgcttttgaataatatccggttttatcatcctgatgcttcccgtgaggaaacggcgcaggccgctgcttcggcgggtctttccggactgatccgtgatctgcccggcggccttgacggccggatcggcgagggcggacgggcgctcagcggagggcaggctcagcgtgtcgcgctggccagagcctttttaggaaaccggccgattctccttttggatgagccgaccgctcaccttgatattgaaacagaatatgaaataaaagaaacgatgaaagacctgtttgaaaacaaacttgtctttctggccactcaccgtcttcactggatgcttgagatggacgaaattgtcgtgcttgatggcggcgcggtggcggaaatcggcacccacgacgaattgatggcgaaacaaggcgtatacgccaaacttgtaaaggcgcaactgggggaaagaacatgagaaaagaagaatggattctgccgtatatgaagcaaaatgcccgtttgtttgttcttgtgatttttttaggcgcggtgacgattttttcggcggcctttctcatgttcacttccggttttttgatctctaagtcggcgaccaggcctgagaatatcctgctggtgtacgttccgattgtggccgtgcggaccttcgggattgcccgttcagtctcacggtacgccgagcgtctgacggggcaccatatcattttgaaaatcgtgtccgacatgcgggtgcggctttacaatatgctggagccggcctcgctcatgctttcatcccgttttcggacgggcgacatgctcggcattttggctgaggatattgagcatttgcaggatgcgtttttaaaaacgattttcccggcggtttccgctttgctgctgtatgcggcctccgttatcgggctcggctttttttcctggccgtttgctgcttttgcggcgatttacctgtttatattggttgtattgtttccggttgtgtcgcttcttgtgacgagagcgaaaaacatgaagctgaaaagcggccggaatacgctctacagccggctgacagatgccgtgctcggcgtgagcgactggatgttctcgggacgccaggcggcctttatttcctcttatgaagagaaagagaaggcgtggtttgaccttgaaagcaaacgtcagcggtttacgagatggcgtgatctcgccgcgcaatgtcttgtcggcggcttcatattgatcatgctgttctggacggcgggtcagtatgcggacggcagcatcgccaacacgatgatcgcggcctttgtgcttgtcgtatttccattgacggaggcgtttctgcccctttcggatgcgctgacggaagtgccttcttatcaggattccatcaaaagaatgagtaaggcggctccggagctgcgaagtggtgaggtgaagcagacggatgagaaactggatgtatcggaagtgacacttacatttgataacgtgacgttttcttatgatcagcacagtcatgtgcttgaccatttttccttcactctccgccaaggtgaaaaaatggcgctgctcggcaggagcggctctggtaagtcgacctctctcgctttaattgaaggcgccttagttcccgattcgggcaaagtgatgctgaacgggctggaaactgcggccgtgcaggagcagatttcctcagcggtggccgttttgaatcagaaacctcatctctttaacacgagcattatgaacaatatccggctcggaaacggcaaggcgagtgatgaagatgttaagcgtgcggcgcggcaagtgaagctgcatgattatattgaatcattgcctgacggatatgaaacgtccgtgcaggagacggggattcgtttctcaggcggggaacggcagcggatcgcgcttgcccgtattctgctccaagacacgccggtcattatccttgatgaaccgacggtcggccttgatgcggtcactgaacgcgaattgcttgatacgatttttgatgtctttaaagagaaaacgatcctctggattacacaccatttagcgggtgtggaaacagctgataaaatcgtctttttagaaaatggaaaagcagaaatggaaggaacccatcaagagctgcttgcagaaaacgaacggtaccggaagctttaccgtcttgatgttccgatcagaacataaacagccgcaaacgagcggctgttttttttgtgcggtttaaaatctcttcttgtttggaatataaataggagacagaagaggaggtacagagatgaatataatggattggacggaacaggatgtgaaagatacgctgccgaagcgggaggcagacagccataaaggaacgttcgggacggcgttattgctggccgggagcgatgacatgccgggagccgcccttctggccggattgggcgcgatgagaagcggtgtcggcaagctcgtcatcggtacatcggcaggcgtcatcccgcttatcgtcccggtgctgccggaagcgacgtactggcgtgacggctggaaaaaagccgcggcgggccagcccggggaaaccatccgggccgctgccatcgggccgggccttcctcaaaatgacgaagtgcagcaggcggctgatcagctgctttctgccgattatcccgtcatactggacgcgggcgccattacgaaaagaacctatccaaagaggaaagcccctgtgatcttgacgcctcatcccggcgaattttccagaatgacaggccttccgattcaagagattcagcagaacagagcgggatatgccgcggaatgggcggagcggcttcacgccacgattgtcctgaaaggaaacgaaaccattatcgcttttcccgacggggaatgccgcagaaatacaaccggaaacggcgcgcttgcaaaaggggggaccggcgacacgctgacgggaatgattctcggcatgctgtgctgtcatcaagacccgaagcatgccgtattgaacgccgtccgccttcacggcgaatgtgcggaattatggacgaaagagcgctccgcccataccttattggcgcacgaactttctgaactgctgccgcgtgtatggaaggaatatgaataaagaaaaggcgtcttcatagggaaggcgcctcttgttgttttacccttgatttcatcaggacataatacagcagcgacggaacggccaggccgatgacccaggcaatgtcgcctccgccgaatatttcagcgagcggcccgatgtaaaaggatgtattgatgaacgggatttctaatataatcgacaaaacgaaggcggccgctgtaatccaattgaccctgccatattgtccgttgacgtcaaacatcgatttgacgtggtattttccgcgtcggataaaatagtaatccacgaggttgatcgccgtccatggaattaagaaataactgatgaaaaagatgaaatttaaaaacagttccatgaaattgctttggcccagtagacttaatacagtacccgctgccgtcacacaaaggatcattaccactctcgttttcggcgtcaccttcagttttaaaaacggctccaaagtagtcgtcgttgacataaaggctccgtataaattaaagacgttgatcgccatttgcccgaacaggacaatgatcagcataataaaggaaaacggaccgaacaatcggacaatctcatttcccgcattagcggtaaattccgggagcgccgtcgtcaaaatggcgccgagaagcatcatccagatggaactgactgacgtacctgcgtagctgtaccaaaaggtatgcgatgccggtgttttgaccggcagataacgggaataatctgcgacatatggcgcatatgccagctgccatgtggccaccgcgctgaccgccactagaaaaacaggcagatctaatgagccgggcacccagcttcctgaaggaatcggcagttgaaaaataagaatcgttgcagcaaaaaaaacggcaaaggaggtccaagagaggattttctgcattttgtgaatcagatcatgaccgtagatcgtgagtaaaaaacagatggcgcttaagccgataatacaccatgaagccggaatcggtacaaagctgctcagtgtaccggctgcgagaatcgtactgctcgcaaagaagcccaggtagataaacatgaccaaaaagaggggcagaatcgctccgatcacgccgaattgcgcgcggctttgaatcatttgcggaattccgagctgaggtccttgtgcggaatgagacgccataaagattgcgccgataaaggtcccgataataatggcggcgatactccaaaagagatcgagtcccattgtaacgggcagtgtgcctgtgactaatgtcgtaatatgcatattagccccgaaccagacggggaataaatctttagcctttccgtgtctttcgtcatgcggaatatgttcaatcgttcgcctttctactttcaatagataatctcctccgtatgttcttctttaacataaagacatagcttaacagattgacctgccgtttacaaattccagcatgcaggaaaaacattgtaaagcttcgctgacagccgttcaaaggtttttttgaaaaacggtacaaacactgccgccaaaacgatttgccagggtttaaaaggcatggatatgcttacggactaatatgtattaaggagaaatgtgtcaatcttttgacgaatggagccattattcgttaagctgaaagaatagtttactttgtgtaaatttcataaatgaaaaggggattgatgatatgtgtacaagtcttacattgaaaacgacagacggtaatcacctattggcgcgaacgatggattttgcatttcagctcggtacggacgtcgtgctttaccctcgtcagtacagctggaaaagcgaagctgacggcaggatgcataagacgaaatacgcatttatcggcatggggagaaatctcggcaatgttctgtttgccgatggcgtaaatgaaaaagggctgtcgtgtgcgacgctgtattttccgggttttgcgggatacgagaaagcggaacgggagggcacctgtcacatcgctcctcatgagtttgtcacctgggccttatcaaactgtgaatctcttgaagacataaaggaaaagctctcaatgctgacgattgtagagaagaagttaatgttgttggatacggtgctgcctcttcattggattttatcagaccgcacgggcggctgcattgtcatcgagccgacaccggagggaatgaaagtatatgacaaccaaccaggagtgatgaccaacagtccggaatttccttggcatgtgaccaatctgcgccattatatcggaatcaggccgcagcagtcagaaagcaaaacattgggcggaatgacattaaccgctttcggccaaggatctggaacgatcgggcttcccggtgattacacgccgccatcccgattcatcagagccgcttatctgaaagagcatttagagcctgccgctcatgaaacggatggcgttacggccgcttttcacgtgctgtccaatgtgaatattccaaaaggcgcggtgatcacagaggagaatgaaattgattatacgcagtatacgtcggtcatgtgctgtgacaccgggaactactactttcatctgtacgacaaccggcagattcacaaagtaagtttattccatgaagatcttgaccgtccggagccgaaagtatttgcggccgcggcggagcagaatatacaggagctgaattagctcaaaaaaaaacaggacgcgattgtcctgtttttttatttaatacggatcagacggatggctttcctgttcagcctgttttgcggcttgtgctgtatctgtagtgccgatcggcccgccgctgttgctttcggaggcttttttcagcccttccgcaacacgttttccgtagtccggatctgcttttgtgaaattctcaatcatttgatcctgaatgtctttccggcaggaagaaagcgtattgaccaagtttgtgatcaattcgttccgttcaaattccgaaaatctgcggtatgtttctccggcctggccgaaattattcgaccggtcgatcgcttcccgcttcacatcgccttcgacatgaggtgtatggtctttcccatcctgctttgcttcgttgagtcctcccataatggacggctcatagttgacgtgcgggttttgtccttctgcccgatcgacccgatactgcatttgcccgccttcctggttggtggcgacatgctttttcggcgagttgatcggaagctgcaggtaatttgcgccgacccggtaccgctgggtatctgaataggcgaatgtccgcccctgaagtaatttgtcatctgaaaaatcaaggccgtccacaagcacgcccgttccgaatgaggcctgttccacctcggcatggtagttttccgggtttttattcagaaccaatttaccgatcggcttccaagggaaatcgtctttataccacagcttggtcggatcaagcggatcaaaatccagctcggggtgttcgtcatcagtcatgatttgcgcatacacttcccattcagggtaatcgcctttttcaatcgcttcatacaaatcctgtgtcgcatggttaaagtttttcccctgaatctcttccgcttccttctgtgtcaggttgcggatgccctgtttcggttcaaagtgatatttgacgagcacggcttttccttcttcattgacccatttgtaggcatggacgcctgagccctgcatctgccggtagttggccgggatgccccacggcgaaaacaagaaagtgatcatatgagtcgcttccggtgattgggaaatgaagtcgaaaatacgctcgacgtcctgaatgttcgtaaccggatcaggctgaaatgcgtgcacaagatccggaaacttcagcggatcacggataaaaaagattttcaggttgttgccgaccagatcccagttgccgtcttcggtataaagcttaacggcaaaaccccggggatcacgcaatgtttcgggggaatgctttccgtggttgacggtagaaaaccgcacaaacgccggagttttcattcctttcttttgaaacactttcgctcttgtgtatgtagaaatctcctcgtctccaaaacttccgtacgcctcaaagtatccgtgtgccccggcgccgcgcgcatgaacgacgcgctcgggaatccgttcgcggtcaaagtggctgattttctccaaaaaatcataattctccaatgtcgtcggtcctctattgccgactgtcctgacattctggttgtcagtgaccggatggccctgccggtttgtcagcgtgtcttctgactcgcctttaccggtcgtcttactggaaagcgtttcttcgctgtttttgttattttccattgttgaaccctcctttttgaacggtaacaatatgcccagcagagccgtttcttaaaaccgattttcaaaagaaacagttattccgcgatcggcgtcaaggacccgccgttccatatttcgcccttgttcagcgtccagctgttttgataaaggctttgcgcgccttgattggccgccggacttaattgttcatcccatgtcaaaaagtacgtggtctcgggatacttttgcctgatcgcattgataaaagcagcataatcaaagcttccgatattgccggacgcaccggtttcggcaaaggcaaacggttttttcagagacagcatttcatcatagcctgatatcgcatacggatcagtgaagtaagcgtccagaccggtaatatccacataagatgagcctgggtagaagtctgttttaaagtctctgttggcatccggcgaatacacccacaaaaggttatccaatcctcttgtctctgtcatatagcggtatatcttcttgtaaagctctttgtacagtgagattctttcattgtctttttggttgtagcctgtcagcccccaccagaaccactcgccgttcatttcatgcagcggtctgaacagaacggtgacgccttgatttttcagctgagtaaggccgtcggcgattttgctgagcagcgcctcaaggcgttttccttcaacagttgaagggtccaggatgtttttgtactggctgtttgagatggccgttttatagtttccggatggaaaagccggatttgcgagatgcaggctgacctgagggaggccgccgcttttccagtatgagattaagctgctgttgcagctgtaatcgatagtatcggtgatatccgctgtttcaagccatcctctcccatagtcacagccgtagatggcgggagactgtcccgtcgcgtttttcaagcggttttcctctgtcattgaaaaagtgacatcgctgtacccgccgaacgccccggacatgaccctgttttctgaacggttgggcaggtgcgccagccagttcatgatatcttttgtcgtctgctgggcatttgggttgacgggataaacggtgtgagccgatatcggactggcggctcctaagagtaataaaacgatagacaggcagacggctaactttttgagcataaaaaagacctcctgatttttagggtgatgaaggatgtgaaacgataacctcacaatctccttctataacaaaatctccggaatccgccggcacgataaagtgatcgcctttgtgaacggggcatccatccagttctccgcgtcctttaatgacgcttgcgagtaaataccggccgggtgcggggaatgatgctttcccgctcacattccattgataaactgaaaagaacggtgtttcggcgagtgttgtaataagagcatctccgatccggtgctttgtgctttttactttttcatcggtatgaggaatctctgttacgtcaattgctttctgaagatgaagctcgcgtttattcccgttcccatccgtccggtcatagtcgtaaagccggtaggtggcatcagagctttgctggatttcaagaacgagcgtaccttcacataaagcgtgcagtgtgccgctcgggacatagaaaaagtcgccgggtttaatagggatgcggcggagcaggtgatcccactcgtttcgttcaatgagccgaacgaagtcttctctcgtttgggcgcgatgccctaaaatgagctccgcgtcttttttgcagtccaatatgtaccagcattccgtttttccgagttctccgttttcatgccgatgtgcatatgcgtcgtccgggtgaacctgtacggataagtccatatttgcgtcaagaatttttgtgagcaggggaaaagcgtcttctttcggatgtccgaacaggtcagggtgttcattccagagacggtgtaatgatgttccgaaaaaaggcccgttccgcacgatggatgtgccgtgcggatgagctgaaatcgcccagcactctcccgtccgctcagaaggaatctcatacccgaatgtatcgcgcagcttcgtcccgccccataatctttctttaaaaaccggttccaaaaataagagcttcgtcattttcccgcctcccggtttgccgcttctaaggcctgctccgccaatacgagcgaaccggccgcaccggagtgaatccctaattgagggggaacgatgtatttttcaatatcgggcagatcaatatattgattcagccgctttttcacgtgctgacggatagaagagaacagctgccgctgcttcatgacgcccccgccgagaatgatcttttccggcgaaagtatgagaatatactgcacaagcgcttcggcaatataataggcctcaagctcccacacttcctgctgatccgcgagcagaaatgcttttttcccccagcgtttctcaatggcggggcctgccgcgaggccttccagacaatctgtatggtaaggacaattgcctttgtagccgtcgtccggatgtcttctgacataaatgtggcccatttcaggatgagacagcccttgaacaaatctgccgttcatgatggcgcccgcgccgatgcctgtgccgaccgtcaaatagaggcagctgtccgcgtttttggccgcgccgaaagaagcttctccaagcgccgccgcattaacgtcggtggtgaagcctgcgggaatatccagagcgcttttgatcgtttgaagaatagggcagttccgccaggctgtcttcggcgtcgcggtgatgcacccgtatgtttgactgtcgggacggatatcaatcggcccgaatgaccctatgccgatggcgtctatcgggaattcttcaaagtaacggatcacctgtctgagtgtgtcatccggttctcccgtcggaaactctgctctgtccagaatggtgccgtctctttgtccggcggcacagacaaatttcgtgccgccggcttcaatacctccaagcatggccgtccctcctcatctgttaaaatccgttttgatcggaaacggatttgaaccagcggccgctttttttgacggtccgttcgcccccgttttccagattgacagatacaaagccgtagcggtttttataagcgtttgtccaagaccagttgtccatgaaagtccacaggtgatagccttttacatttgaaccttctccgatggcccgatgcacccatttcagatgttcctggataaattcaatcctgtaatcatcctgaatgatgccgttttcatcgcggaagcgttcctcgccttcaactcccatgccgttctcagaaataaaacactcgatatttccgtaatgttctctgagattggtgagaatgtcgtagattcctttttcgtaaatttcccacccgcggtgagggttcattttccggccgggcatgacatacggatcgaagaaacgctcaggcaggaaaggggcatgcggattcggaacatgttcttttgccttaacgcgcctaggctggtagtagttcacgcctaacaggtcgaccgtatgctcctgaatgaggcggagatcttctttctcataatgcggcagaaagccttccgccttgagaatctcgacaagttcctcaggaaattcgccctttacggcgggatctaaaaatgagcggttgaaaaaggcgtcggcaatccgggacgctttcagatcttcaggatgtgagcttctcggataagaaggcgtcagattcagaatgattccgatttgtccgtcctgtttcaattctctgtaggctttgacagcccttgcattcgacagcagggtatggaagccggcctgcaccgcttcttgaaaattaacgtgattcgggtagtgaaagtcgtataagtagccgccttcaatcggcacaatcggctcgttgtgagtgaaccattttttcaccttgtcaccgaatagcgaaaagcaggttttggcgtaatgttcaaaggcgtcaacggtgttccggctgacccagccccccttacgctgaagggcgagcggcatgtcaaagtgaaacaaattgacaaacggctcaatgcgatgggcaagcatttcatcgatgacgtcctgataaaacgcgaccgctttctgattgacctcgccagttccgtccggaatcaatcttgaccaggaaatagacagccggaaggagttgtggccgatttctttcatcagccggatatcctccttgtattgatcgtaaaaacgtgacgtgtcgccgggaccgacgccgttaaaaaaacggctcggctctttttcataccagtaatcccatatgttttggctttttccgtctctgtcggcggcgccttctgtttgggtggcggaggcggaagacccccaccagaatccttccggaaaacgatattgaatatttgattcagtcaattgatttctctcccttactgcgattttgattacatactcatgctgtcatcccgggcatgctgctcggtctcagcttctttttcctttgccatgtttaatttgtccagcgctttaagaaacgggaaccagatgacaaacacaatacagaggttgaccagctgcataatgccgcccatgacggaattggtcgccataatcccgttaatgaatagggggacggtccaaggcacggtcacgccggtaggagggggcacgatccccgccgacatggccaggtaggtgacaagggtgacaaccatcggcgcgatcacccacggaatgataatgatcgggttcatcacgatcggcaaaccgaaaataaccggctcattgacattgaaaatgcctggcgcgagaccgagtttagatatctgtttcatctgtttgcttttcataaaaagcaagatggcgatcactatggccaatgtcattccggttccgcccattccgacggtgtaaatctccataaacggcttagaaataatatggggaatctcttttcccgctgtatacgcagccaaattttccacctgtaatgtattccaaatcgggtccatcacggaattgataatgatttgtccgtgaagtccgaaaaaccataaaatctgaataaagaaaacagcgattaatgtaggaatgatgccgcttccaagtccgacaagcggggcttgaaccgtatgataaatgacatcatgcagattggtgtgaaagatctgggtgacagccgcattgatcaagaggaagacggtaagcgtgataaaagccggaatcaatgcggcgaacgatttagcaacagccggaggaacaccggcaggcatcttaatcgttaagtttctctggacgattcttctgtagatttcacctgacaaaaaagcggttatcatgccgagaaacatcccttttgctccaagccggtcaaccggaatgacgcctgcgaccgctttgcccgtttccggctctaagacgaacggggtgagcagcagaaaagaaaccaatgcgatcgctccgccgaatacggcctccacttcgtagcttttggaaaggtaatagccgatcccgaagacgacaaaaatggacataatccccatcgtcgccgtcgaagcgccgccaaatccggattgaaagacagacagtgcggagctgctcatgattttgtttaaaaacggcaggttcgtcagcacgacgaacaccgaaccgaaaatggtcagcggaaacgccagcataaaagcatcccgtaagacttgcaagtagcggttattgtttaatttgccagcgatcggaataaggaattggctgattttctcaaacacgtcttcacccccggctttctataaattttttgattgaaataagtcgagcatctctttaacgagctctttcattgaaagcgctgacattaagtggtcttcagcatgcataaaaagcagagagacatccgtcttggcgccgccggcttctttttgaatcatctgaaaatggatgtcatgcgctttccccagttcttcttcagcctttgtcagaaaggtgcctgactcatctgtccggccgtctttatatgcgcgtattgattgaataatattgctgcgggcattgccgctgtgaagaatcagctgaaaactgatctgttcatccgtgtacgtttccatgcttatcgcctcctttatttgttctctatcaaggcaacggcctgttcgtatgcttttttgccgtcccccatgccgtatgccatcatatcaatcacatcaatggtgatgtgaagcgggtccgcctctttttgaagctcaccttttaaaaaactcatctgcgggccgatcagtacgacgtctgcatctttcatcgcttcttttgctttatcctgtccgactgcccaaatctcggcttcctcaccgatggagcgggcgtaattctgcattttcgtgacaagaaggctggtggacatgcctgagctgcaggctaataaaattcttttcatgaggaatcccttctttcgtaaagttaaaacgttttcataaatattataatcttttcaaattaaatgtctatacttttaaaatataaaagttttacttttcggatttttgacataaaaaaaccttttaagattcaacttaaaaggtttttcatctcaagcgagccataacagccataaatagagtccgatcagggtgataaataacgtcggaatggttaatatcagacctgtcttgaaatacattccccaggaaattttcacgtttttccggctcagcacgtggagccataacaatgtcgccagcgatccgatcggcgtaattttcggcccgaggtccgaaccgataacattcgcgtaaatcaatgcttctctcatcagcccgtgagtgccagttccgctgatggctatggcgtcaatcatcactgtcggcaggttattcataacggaggagaggatcgcagcgataaaccccattccgagtgtgcccgcaaacaaaccgtgatccgccgctttctgaataagctgagaaagaagatccgtcagtccggcattccgcaagctgtacacgacaacatacatgccgacagaaaaaaacacgatggcccacggggcgtccttgatgacttgtttcgcagggacggcggggcttcgctgcgccagaatgagaaaaatgaccgcgatggagccggcaacgaaggaaacgggtatcgacagcagttcgctgacgaaatatccgatcaataaaacggccagcacagcccacgataaccggaaaaggcgttcatccttaatcgcggatgccggatgtttcacaagaccggtgtcataccgtttcggaatgttttttctgaaatagagatacagcaccaaaatgcttgccgccagagaaaaaaggttgggcaccagcatgcgtgatgcatattcaatgtacccgatatgaaagtaatcggcggatacaatattgaccaaattgcttacaacgagcggaagcgaggtggtgtcggcgatgaatcctccggcgataataaacggaaaaaccagcttttcaggcaaattcaaagcccgcaccatcgccagtacgatcggcgtcaaaatgagcgccgctccgtcattggcaaacagggcggagacaacagcccctaagaccgacacatagagaaacatccgcagcccgctgcctttggccgccatggccatatgcagcgcggcccactcaaaaaaaccgatactgtcaagaattaatgaaatgataataatggcgataaaggcaagtgtcgcattccagacgattcccgtcacttccgcgatatcgtgcaggctgactgctccggcgatcaaagcgaggaccgctccgccgcaggcagaccagccgattgatacatgtttcggctgccatatgacaaacacaagtgtcagcacaaaaatcagcgctgataaaaccgcaactcccaagaatatatcccccttaccggcatgtaacagtgacttctttttgccgcaatgtctgtaaaacttcgtccttttcatctatctgctgcagaatcgagcaaaccagcgcgtattccggaccggacggatgaaaggcatagtaccgccactggccctcgcgtctttcctgcacaaggccggcgttctttaatttccgcaagtgctggctgatgccgggctgacttatatcaaaaatagccgtcagctcgcagacacaatattccttatcctccagaagcttcagcatcaaaagcctcgtccggtcgcttagaagcttgaggcactggctgatcccttcggaacttaaagcatgatgccgccgttccatgcgctcactcctttttcacactattatataagcagatgtttatataagtaaacgacaatataaaaaaagccggtcttgcactttttgcaaaaccggctcatgtttatttttggaacagttttttcgcttcatccattgctaatttatttcccagtgctgaataatcaagccaaggctgatcggcaattttatagacgtggtttgatttcacggccttcagccctttccatacagcgcttttttgcaattctttataggcttgctgtgacttgtcgtctctgttaacgacgacgaaaatcgcatccgcgttgtaatcaggcagcacttcttgagaaatgacttcataagggcgggaggtgttcatttctttaatgccgtcagccggtttcagcttcagatcgtcaaacagaatcggtcccatcgggcggcgtgtgctgaagacgcgaagctcttttgcgttcacgcggatcgccatgactttggcgtttttccctaattccttattcatcatggatctgacttgttttgtttcatcttcgtaatcttgaataaatgttttcgcttctttttcacggttgacgatttttccgatgtcttttaaatgatcgcgccaagtgcctttatcaaggtcgaaaacgtgtgtgtttccgattttcttgtattttgacacatcttttcccgcaaattctttatcaagataaatgttgtctggattcagctcaagtaaagcttccatatccgggtctgaggcaggtccgagttttttcgtgtctttcagctgatttttcacatgagggagaaaatcttttaattctccgcccacgacggaaccggccggtgtaacgccgagagccagcagatcatttgtcaggtgaatggacatcgaagcgattttatgatcgccggatttcttttttgactccggctgtgttgaatcggattggcaggcagccaataagaaaatacacatgaaactgatgagcgcaattatttttttcatgggaatactccttgttttatgatttgattttcatgacgagatagagaaaatacggcgcgccgatggctgccgcaaccacgccggccggaatggcgttcggctgaaacaaagaccggccgatggtgtctgccgcgacaagaatgacaagtccgattaatcctgcaatcggaataatatgctgatgcatggtgccgacgagacgtcttgccaagtgaggggcggcaaagccgataaagccgattcccccggccatcgcaacgctcgcgcaggacaagccgaccgctatggcgatcagcatgatcctttttctctgcacgtgtgcgccgagccccgcggctgcctggtcaccgagcattaaaatattcaaagaccgggcgttcagccatgcaagcggtgcgagaatgccgatccagggcaatagcgaccacacgtgaatccaatccctgccccagacgtttcccaccagccagcgggaagcgaatgtataggtttcttcattcaggcgcagcgacataaacaatgtaacggcgctgaagcccgcggaaacggcgatcccgactaacagcatgcggatcgttaaaaaaccgttcagcctgtcgtacgtaagcactacgatcagcagggcggcgagtgttccgcccgcaaacgtaaacagcgggatgaacatcgacgcttgcgcctccaaggaatgaaagaatgtgatatacatcatcaaaccgaaggaagcgccggcatgcagtccgagaatgcccggatcggcaagaggatttcgggatacaccctgcaaaatagcgcccgacactcctaaaccgatgccggccagcatcgtcaccagaatccggggaagccggtaatcgaataaaacggttgtgctctgaaacgtgccgtatccgaacagcgtttttcccacggtgagaggagaaagccggaatgagcccgtatgcagcccgatcagaatcatgcaaacggcgatgaccagcagaatgagtcctgccgccgccgctttttttgtttctttctgcactttcatttataagtctctcccttccttgcgggcaatataaagaaagaaagggacaccgacaagtgcgaccataatgcctatcgccaattccctcgggggactgaccgtgcgcgaggccaggtcagccaaaatcaatagaatcgcgccgagtaacgcggacatcggaataatcagcctgtacgtaacgccgacgatctttcgcgcgatatggggaatgaccagcccgacgaagccgatcgcgccggcagcggaaacagacacaccggcaagaacgacggcgatcattaatccggcggcacgcgtcagagccgtgttcacccctaaattcgccgccacgtcatttcccattgagagaagggtgacggaccggcccatgaatgtcgcgagaatgatgaagactgcaatcacgggaacaaggacttgtaaatgagcccacttgatccctgacaccccgccggcgtaccagaaggccaaatcctggcttaaatcgtaataaatcgccacaccggtactgagtgaatgtaaaagagcggccacgaccgccccggcaagcgtcacctttaaaggcgtcatgctgccttttcccgccgcactgataaagaaaatcaagccggtgcttgccagtgctcccaaaaatgacatcaccatcagcagggcgtatgacaaatgagggaaaaaagcaaaactgagcgcaacaacaaacatggcgcccgcgtttacgcctaagacacccgaatcggcaagcggatttctcgtgacaccctgcatgagggcgccggctgcagcaaaagcggctcctgtaacggccgccccgagcaccctcggaagacgcaattcatgaatgatctgctggcccgttatgttcggattgtaatcagcaacagccgaccaaaccgtatgtaaagtaatgtctttcgcgccgaatgagacggcgaaaaaaatagatacaagcagcccgatcaccgcgatcaggaagaaaaccccgttttttaagatgctgatcagacggtttgcggacgtgacagaatcgctcaaaaatcaattcacctacttttatgatcattgtccggtatttattgaatatgagaatcattttcatttgaaccatcatattataccgagccgattttcaaaacgcaatagagcgttcaacaatgatgtcctttttttctctcatgtttatattgtaaaaaagaagtgaaaaacgtgaaagaggaaatagctatattcagaaaggagggaggcaaatggcgggagaaggaaagcctttgccgattgaattttaccagaggccgtcagtggagcttgcccctttattgctcggctgtctcttggtgaaggagacggacgagggaacggcttcaggttttatcgtggaaacggaagcttatatgggagcggatgaccgggcggcgcacagcttcggcaaccggcgcacgaaacggacggaaattatgttccatgaggcgggccgcatttatacatacgtcatgcacactcatacattaatgaacgtcgtcgccgcggacatcggcattccgcaggccgtgttaatcagggcggcggagcctcatgaaggacagttcctgatggagagcaggagaccgggcagacccccgagagagtggacaaacggcccgggaaaactgacgaaagcgatgggcatttcaatgaacgactacggcggcatgatcacggaaccgccgctgtatattaccgagggctttacgcctgaacatatatcaacaggcccgagaatcgggattgacaacagcggagaagcccgggattatccgtggcgctattgggtgacggggaaccggtatgtctcacgctgaccatgtttataaccgctgataacaggggaaagacaaggtaaaagaaaggggattcagacattgaaaaaatttttcaaaacgattatcaaatgggcgcccgtcatctatccgatcatcagaaaaatcataaaagaacggaaggcatctaagcggaaccgcatgtccgcatcccgaacagccggctgatccggctgtttttttacgggcttggcatcggattgccgcattgacttgaaatccttcccattatagaatttacatacatttaccccttcctcattctttttgcccatttttcacgtctgcatctgatctgataggaggtttttctcatgcttcatgggcggcttcgtgaacttctgcgcttgcttttagctgctgaaacaccggttacaagctcagtcatcgctgcaaatgtaaaggtaacgacacggacggtccgcaatgacataaaggaactgcaaaccattgtagaaaaacacggcgcatccattcaatctgtcagagggagcggctataagctgctgatccggaatgaacagccgtttaaaaactggcttcaggacaatttccagcagaacagcaccgtgccgatttttcccgatgaacggatagattaccttatgaaaagaatgcttctgaccgacggctacctcaagctggatgacttggcggaagaactgttcatcagtaaatccacacttcaatctgatttaaaagaagtcaaaaaacggctccgcccctatgacatcattttggaaacaaggccgaactacggctttaagctgcgcggcgaagagctccgcctccgttattgtatggcggaatacttagtggacgaccgcgagcctgagcctgatctcctgagtgaaaaggccggtattctgccgaaagacgacattcatgtgatccgcacagccattatgaagcaggttcgaaaccataagatcccgctttctttcttcggcctgaacaatctcatcatccatatcgccattgcctgcaaacgaatccggacagaaaactatgtatctctcattccggaagatcttcatgatattaagcttgaaacagaatatcagtcagcggaagccatcgtaaaagagcttgaatctgtgctttcggtcacctttcccgaacaggaaaccgcctatatcgccattcacctgctcgggacaaagcgcatgacccagtcacaactggaaggaaaagagcttacaaggctgatagacggagaaaccagccgtttgacggaggccatgatcgaagccattgagcgggagctgaagctcggaatcacggacgacaatgagctgaaagcgggtcttgcgcttcacatcaagccggcgattaaccggaaccggtacggaatgaacctgagaaatcccatgctcgccgccataaaggaaaattatccgctcgcatttgaagcgggagtgattgcgggaatcgtgatcaaggagcaaaccggcattgatattcatgaaaatgagatcggatatttggcgcttcatttcggagccgccatcgaaaggagaaagacggaacggccgcctaagcgctgtctgattgtctgtgcgtccggcgccggcagcgcgcagcttttaagagaaaagctccgttcccggttcgcaaagcgtcttgaaatcgtcggaacggctgattactgcagccttgaccagctttcctttgagtcgattgattttgtggtcagcacagtgccgatcaaaaaagacctgccagttcccgtattgaaggttcagacgctgttgggcggcggggattttacaaaaatcgacgccatgctggaagaaaagcgggaacaattgaactttctgaaaccggagctggtatttttgaagcaggatctggagacgaaggaggccgtcatccgttttctcggacagcaggttgcagaagccggcctcgcttctgattctctgaccgattctatttttgaaagggaagcgatttctcctacgagtttcggcaatcttacggcgattccgcacccgctcgttccgcagacagacacgacgttttgggcggtatgcacgctgaagaagccgattgactgggcggataagcgtgtccaatttgtctgcctgctctgcgtcgagaaagaaagcaaagccgacctccagcatatgtacaaatggctcggcgggatgttagatgatccggccgcggtaagccgtctcttaaaatgcacaacctatcaggaggttttacgagtattcagagacaaacgatcagagaaagaccgggatacaccttttttccgttagcagcggaaaaagcctgagtagttatgaaagcgatttcataatatgatggtactaacatcgagacatacaaaatatcaaactttcaggaggtcttttacatgaatatattactcgtttgtgcagcagggatgtcaacaagcttactcgtcaccaagatggaaaaaagcgcgcaggaacaaggaaaagaatataaaatctgggcggtgtcaggcgattcagtcaaccagcatattgataaagcggacgtattgctgcttgggcctcaagtccgttatttgcttccgcagctgaaaaaattgggtgaatcaaaaggagtgccggttgaagtcatcaataccgtccattacggcacgtgcaacggagcggaggttctgaaatcagcggaacagctcggaaacgcatcgtagaaaggggcgggccgtgtgaataaggtgaaccagtttttagaagagaaagtcatgcccattgccggaaaaattgcctcccagcggcatctgcaagcattgcgtgacgggatcatcctcaccatgccgcttatcatcatcggttcgttttttctgatcatcggcaacctgccgattccgggatatgcggatttcatggcaaagacgttcggaagcgcctggtctcaaaaactgcaatatccggttgatgcgacctttgaaatcatgggtcttgtcgccgctttcggaatcgcctaccgcctggccgaaaaatacggggtggacgcattatcggccggtgcgatatctttggcggcgtttctcttggcaacgccgtacaaagttccgtttctgccttccggcgccaaagaggaaatcatggtgggcggcggcatcccgctgtctctcatgggaagcaaagggctgtttgtcgcgatgatcatcgccatgctgtcgacggaaatttaccgcctgatcatccagcggaatttcgtcttcaaaatgccggacggcgtgcctccggcggtcagcaaatcatttgtcgctttaattcccggctttgccgtcatctttctgatctggggcgcgcgtttaattgtcgaagcgacgccgtttgaaagccttcataacattgtaagcgttgtactggggacgccgctctcgattcttgggggaagtctcggcggaagcctgatagccgaagcggttcaaatgctcttgtgggcgtgcggattacacggggcgaacatagtcggcggcgtcatggcgccgatctggttcggagcgatggatgccaaccggattgcgtttcaggcgggcgatgcgcttccgaatattttcacccagcagttttttgaaatctggatcaacatcggcggaagcggcgcgacactggcgctcgtggtcaccatgtttctccgttcgcgaagcaagcagatgaagcagcttgggaaactcgccatcgggccggccgtctttaatattaatgagccgattattttcggaatgccgatcgtcatgaacccgatgcttctcattccgttcattatcacaccgcttgtcacactggtctttacctatatcggcatgagcactggcctcgtcgctaaacctgccggcattgccgtcccatggacgatgccgccgattttctccggctatcttgccacgggcggaaaaatatcaggggctgtcatgcaggcgattaatatcatcacagcctttatcgtgtactatccgttcttcagaatgtgggattcgcaaaagctgaaagaagaaaacgaacttgaacaatcgcaggcgccagccgtacagggagacgaaaaagccgtgctgtagagaaagggagtgaaacacatgaatgaaaaaatggaacagaccatttttcagatcatcctgcatggcggcaacggcagaagcgcatcaatggaagccattgccgccgcaaagcggggggacagagccatggcggaagaaaagcttcaggaagccgcaagggaactgaccgaagcccatcattatcagacagaattgatccaaaatgaagccggcggagaaaaaacagacatgacgcttttgatggtgcatgcgcaagatcatttaatgaatgccatgaccgtgaaagacttggccgctgagttagtcgagatttacgaaaaagtgagtctgcaagggggagcaaaaatatgacaaaaggaattaaaattgtaacgatcggcggaggttcaagctatacaccggagcttgtggaaggcatcattaagcgctatgaggaactgcctgtcagagaattatggctcgtcgacattcccgaaggcgagaaaaaactcaatatcgtcggcacgcttgcaaaacgcatggtcgaaaaagcgggtgttccgatagagattcacctgacgcttgaccggagagaagctttgaaggatgcggatttcgtaacgactcaattccgcgtcggccttcttgaggcccgcgccaaagatgaacggattccgttaaaatacggcgtaatcggccaggagacaaacggtccgggcggtttattcaaagggctgcgcaccatcccggttattctggaaatcgcgaaagacatcgaagagctttgtccgaatgcatggctcgtgaatttcacaaaccctgccggcatggttaccgaggccttgctccgctactcgaatctcacaaaagtcgtcggtctctgcaatgtgccgatcggcattaaaatgggcgtcgcaaaagcattggatgtggatgtcagccggatcgaagtgcaatttgccgggctgaatcacatggtcttcggattagatgttttcttagacggcgtcagcgtgaaagatcaagtcattgaagccatgggagacccggaaaacgccatgacgatgaaaaatatttcaggcgcggaatgggagcctgaattcctgaaggcgctcgatctgattccttgcggctaccaccgctattatttcaaaacgaaagaaatgctcgagcatgaaatagaagcgtcacagacggagggcacacgcgccgaggtcgtgcagaaggttgagaaagaactgttcgaactgtacaaagatccgaatctcgccatcaaaccgccgcagcttgaaaaacggggcggagcgtactacagtgacgcggcctgcaacctgatcagctccatctataacgacaaacatgatatccagcccgtcaatacaataaacaacggcgcgatcgccagcattccgaatgactcagcggtcgaagtgaactgtgtcatgacgaaagacggtccgaaaccgatcgccgtcggtgatctgccggtgtctgtccgcggactcgtccagcaaatcaaatcatttgagcgcgtcgccgctgaagcagccgtcacgggagattatcaaacggcgctacttgcgatgacgatcaaccctctcgtcccgtcagactccgtggcaaaggccattctggatgaaatgcttgaggctcacaaagaacatctgcctcatttctttaagtcgattgaagcataagagcagtaaaaaaacccggattcgcttccgggttttttgcttattttgattcgcttagtgaggcgacttctgtcgtccagccgaacacgtcggcttccgcgcctttttgaatgcctgtaatggtatcgtacaatttcttcgagatctctccggtttcaccgctgccgatgacaagactttcatcattccagatcagctcgccgaccggagaaatgaccgccgccgtaccggttccgaatgtttcttccaatcggccgtcacgatgcgcctgaatgatttcatcgatcgaaatctttcgctcagacacagtcagtccccaatgtttgagaagggtgatgacggaatttctcgtaattccttcaagaatacttccgttcagctccggcgtcacgatctcgccgctgattttgaagaagatgttcatgctgccgacttcttcgatgtattttttctcaatgccgtcaagccataaaacctgggaaaatcccttctcttccgcaacctgctgcgctttcaggcttgatgcgtagttgccggcggttttcgcgtttccggtgccgcctttgacggcgcgcacgaattcgttctccacggcgatttttaccggtttaatgccttctttgtaataagagccgaccggggaaagaatgataaacagcttgtacgtatgggatgccgctacaccgaggaaaggctcagtcgcaataataaacggacggatataaagggaagtgccttccgctttcggaatccagtctttgtcgatggctacgagctgtttcaggccttcaagaacaagctcttcatcaatgagcgggatgcaaaggcggtcatttgactggttcaggcgctccatatttttctccggtctgaacagaagcacttcctgatccttcgttacatacgctttaagcccttcaaaaacggtttggccgtaatgataaaccatggccgcaggatccattgagatggactgataagggataattctcggatcataccagccttgaccggcgtcgtaatccataacaaacatatggtcggtgaaaattctgccgaacgcaaggtcatgggggtccggtttcggttttttggctgaagtcaattcaacacgaatatcttgtttcataatgttctgtctccctattggtgttattgtcaaacttatttgaaaatagtttatattctattgtataccttcaacaaatattcgcaatagttttcctcaaatttgtgaaaaaatcaaatcacataaaaagcaggggagagaatgccccctgcgtgttcgtttttacgtattctgtcatcaccgtgctcagtgaaccgtcaccttgccggttttgtaaaactgctccattgctttatcgacgtacacccagcccttccaggcgatatggatggtgtctttcataaagtacggatcatattcgtgcccggataagtcggcaacctgaaagcccttcgctttaatttgcttagtgacttttttgtagtaatcagtccggccttttttcgggaagcctgtgtagtcataccattttccgttgaccggaataaccacgaacatcggctcagcgccggcatctttcagaatgtccagcatatccgcaaagtcgtgatattcgactgatttggcgtatgttcttcctttgttgattcctttcactctctttactttcttcttaatctttttataagaagcgtcatcgatatagaaaggattggacttggagctccgttctcctaattgagcggcagctgtttttaactctgaccacgatttccctttcaggttttcagagatcgtccgttcagggcccttggtttctcccattgaataataaagatcttttttctcaagcagagaataataagctttggcagccggcatgaccgctttcactttccatgattgtccgttgaccattcccttgtataattcagaaaggacggcatcatgctgaacgactttaaaacggagcatgcgcttcatcatgttctttttgactgcgggatcaatctggttattaaatgctaaatccaatgcctgaagtgatgaaaaattcggcgcaaagtgctgttcatcagaaccttttttgataaaccattgcggagaaacaatgaataccagttttttgcccttcagctgctgataatgcgccgcaaagttcacggcgtgtatcaaggattggtccccgccttttccgacaagataaggcgtaaagccttggttgttcacttggaaatagttggacgggtgaaactcatccagtcttgaaagctcggaagaaccgaaaatcggcatatacttcgagtcttcgaacattttgttttgcagatagagcccctggaacatattcggatttaaggctgccgccgactcttcgacacgtttttcaggaatgaagcgcgtaagccatgaagccggaactgcgatagctccgacaaacaggacgaacgctaaaataattggtccaaagaaacgctttttcatttacttcaactcagtcagtttgtttacaatgttgtttggcgtattccactcgtcacggtcaaattcagtgattggcactgtaatgccgaagcggttttcgatggcgacaagcagctctacagttccgaaagaatcaagcagtccttcttcaaagatttcaatatcaggattttctttcacagcgtcctcctgacaaacttcagctaatacgtctaatacttcctgtttaaattccatgtgttttcaatctcctttagtgatgaaatggttttcctgagaaaatataaaatccgaaacatacgaaatggaatgtgatgacgatggctaaaaaggccgtaaaacgattggcgggcagccatttgtatttcttattccatttctcaaaaaagttatacccggtcattaatacggcgtggtacaggccgtatacaatatattgcagggcgagtccgtgccagacgcccatcagcatgaacagcaggaaatacccgatgttcgagacggccatccggttctttatccattttttctttgtcatccagaaaacaaagcgcataaatacgtagtctctgaaccagaaggataaggacatgtgccagcggttccagaagtctttaatgtttttgctgataaacggcttattaaagttttccggagatttaatacccatgatatagcttacaccgacggcaaacatcgtgtaacccgcaaaatcaaaaaacaggtacaagctgtatccgtacatgtacagcacattaccccacagtttgctgtgggtgatatgagacagattcataatgaaatacgtgttaatcgcatatccgataatgaatttgtataagaaaccgataaaaattttatgaatgccggtatacagtaaatcagcgtattctccctttgtccatactttctgttcgtccttggcaaatctgcggtatctgtcgatcggaccggaagaaatggtcgggaaaaacataataaagtacaaaaggcggtgaagcggcattttttctttaatcagtccgtctctcgtttccatgatcagctggacgcctttaaatgtcaaataagaaattcctaagaaactgatcaggttatgaaccgggtgatgaggcgccggcggaaagaaaaacggccataatttagataaaaacaggggtaaaatggacgcgattacggccatactgaagacaaagccgctgttggctttcagtctgtaagcgagatagcccctgattaaaagcacctgccacagcgtaaagatacatagtgcgatcacgccgtgcagatcatgcgcgaaaatcaaagccaatacgatgatggatataaacatgttgtatccttggaatctcttgccgttcagccctaaaataatcgtcggcaaaagaaggattccaagtaagataaagaagaaaaacgagctgtaaggcgtcatacaagaacctcttcgccaatgcgtttacggtcgatttttccgttcgcagtcatttgaatgtgatcctgataaatgaattttctcggaatcatgtaggccggaagcgaagcggccagttctttcttaatggcgcttgtcagctggaattctttttcaaaatcgtgtttttcaggcacgatggcggcaattaaatattcgacaggtccgttaggctgatacgggatgacaaccgccgtgcgtacatattgagactgccttacatgtacttcgatttcctcgagctccatgcggtagccgtgaagcttaatctggaaatcaaggcgtccttggcagaaaatctgaccatcctgaacataaccggcatcacccgtgtgatatgcccactggccgtcgatcgggaaaaacgctttttccgtcagagaaggctctccgagatagcctttgctcacgctcgggcccgcgatgatgatttcccctttttctccgtccggaagcttattcccgttttcatccatgatgaagatatccatatcgggttttgcaaaaccgacaggcagagattcatgttcatcgatgatctgctgtgtaatttcaacggaggtgacggcaaccgttgtttcagtcgggccgtatgtattgaatacacgggccttcggaaaacggtttaacagctcctgtgccacggcagccggaagcgcttctccgcaaaacataaatacttctgcctcaggcaggagctcctgcgtaaagccggggtccatcagacacatttggacgaaagacggcgtcgatgtccagacgttcagtttggatttctccagctcttcaaatagtactttcggtttattgattttgtctttcgttacgcaatgcagcgtacctcccgtttgaagcgacggaaaaatgtccatgacagataaatcaaaagaaaacggcgcttggtttaagaatgtcttaccctcgcccacaggaaaatccctgcagatccagtcagtgaagctttgcaggttatcagccgatatctgcacgcccttcggatttcccgtgctgccggacgtgtaaataatgtaaaacgtatccagctcttttacccagttctcacggctgaggtctgcatctccgtcagctgcaagctcttcgggcgtaacggttttaatcagattgcttcccgtatcgactgcatcgcccgatacgctgataagcagctctgcgcctgagctttcaatgattttgacgatccgctccgccggaatggaaacatcgacagggatgtaagggcggcccgctttgacgcttcctaagaaagaaacgatcatattcggctccatatgtccgtaaaccaggacaggcgctttcgaaccgtcagctgtatgtttttgaatgccggacgcaacccgctccgacaaatcccataattccccgtaagtgagggaatgatctaaggaacgaaacgcttcggcctgcggcttggcgtctgcgtatgtttttatagcatcaagtagtttcatagttatcctccccgattagaaatcgttgtaaatataagtgccggtattcgctgtatgaaatccatacatccaaaagagcaatactaatatcagaaaataaaagcccgtatgaaacgtccatttgatcaatgtattttcataagcacgttttaatttttgcatcatattcaaaattccttccccgcgtattcaataattacaccagtatatgacgattagattaacaaaaagtttcaaaatatgtctaatatcctaagcttaaaatttccttaaaaatgaatgaggaacaaaaggatggaaaacacgcatgtataaattggcaaatgatcatactaaaaaggcgctgttcaggcgggatttttaacttatcgtaaatataaacgaggtaaaaaaattttggcggctttttcttaagcaggcttgtgccgaaccccaatggagaagggcgaaaagccgtttccggcaggatagccgataaagcgccgcatcttgtgaaatgaggaagaaattattatgatagataaggtagcagaaacgtgaaaaccccaattcaacactactgttatcggctgactgtgaaagccttttaatagaaaggaagaggaaaatgaatcaaaacaatatggggggcagccaaaagacgcccgagaaagaaagcatgggccgcattttgtggcagctaacccgccctcatacattgacggcatcgtttgtgcccgtacttctcggcaccgtattggcgatgttttacgtaaaggttgatttcctgctgtttttggccatgctgttttcctgcctttggatccagatcgccacgaacttattcaatgaatattacgattttaaacgcggtttagatacggaggattccgtcggtatcggcggagcgatcgtccgccacggcatgaagccgaaaacaattctgcagctggcgctcggctcttatgcgattgccctcgtgctcggtgtttatatctgcatgagcagcagctggtggcttgcggttatcggccttgccggcatgctgatcggctatctgtatacgggcggcccgctgccgattgcgtatacaccgttcggggaactgttctccggtatttgcatgggctctgtatttgtccttatttctttcttcattcagacaggcagaattaatgaacagagcattttgatttctatcccgatcgccatcttggtcggagcgattaacctgtccaacaatatccgtgatattgaggaagataaaaaaggcggtcgtaaaacgctggccattttgatggggcatagaggggccgtcatgatactggccgcatcatttgccatcgcttacatctggatcgtcggtcttgtcatcatgggttacacaagcccttggctgttcctggtctttttgagcgtgccgaaacccgttcaggccgtgaaaggttttgtgaaaaacgaaatgccgatgaacatgattattgcgatgaaatcaacggcgcaaaccaatacattcttcggattcctgctttcaatcggactcctgatcagttatttccgctgatcaaatgaaagggcaaatgccataatcggcatttgctttttttatgacataatcttcacgatattgtaaagaacctgaccgcggactgacacgtctcatatatggacagcaaagcaaggagatgaaaaaaatggacttgtcaacagcccatatggatgatttgaaaacggtcatggaagattggaaaaatgaattgttagtttataaattcgctttagatgagctggatacgaagttttctatcatcagccaggaatataatctgattcacgggcataacccgatcgagcatacaaaatcacgcgtaaaaagtttcgagagtatcgtcaataaactgatgcgcaaaggctgcgatgtgacgacgcaggaaatgaaagagcatattcatgatattgcgggtgtcaggattatctgttcctttatttccgatatttataatgtcgctgaggttttgaagcagcataaggacctgaagatcgtaaaggtgaaggattatatcaaacatccgaagccgaacggctaccgcagcctgcatttgattattgaaattcccgtttatttgacgaatcgtgtggaatatgtgaaggcggaaattcaaatccgcaccattgccatggatttttgggcgagcctggaacataaaatttattacaaattaaataacgaagtcccaaagcatctgaccgacgagctgaaggaagcggcggacatcgcccattatttagacgaaaagatgcttgggattaagaaagaagtcgattaaacgattgacgcatcacaaccagccggaccgcttttatgtgcagtccggctggttatttatccaatgacgctcaccgtttttcgctgtcgaccttgatcgtcttgcctccggtcacatagacctcgcagctaagatcattttctttcctcaccccaaacaaagaagaaagatatcaaatcgcaaacagcacattcccgcagaaaaaatgtgtaagattgaggtttacttttaaaaaaaagggaaagacatttgtacaacaaaaagggagatgaatatcagtgggaaagaatgaaacaatgcatatcgtatcatgtgccgatgatcattatgctcgtcatttgggtgggatgttcgcttctttattgatgaatatggataaaacaaggaatgccaaattatatgtgatcgacggcggaattactgccgaaaacaaggacaagcttgaacagaccgcgatttcattcgggacgccgcttgaatttttagaagtagacgctgatcaatacaagcatgcagtcgaaagcagccacattacaaaagcggcttattaccgcatttctatccctgatttaattaaggatgagtccgtaaagcggatgatttacattgattgcgatgcaattgtgatggaagatatttcggttttatgggatttggatatttccccggcaatagttgcggcggtagaagacgccggacagcatgaaagactgaaaaaaatgaatatcagcgacactgccaagtattttaattccggcattatgattatagatttcgaaccttggagaaaacaaaatatttccgaaaaggtgattgattttatcaacgaaaacagctcggaggattttctcgtgttccatgatcaggacgcgcttaacgcgatcttatatgatcaatggcatgaactgcatccgcgctggaacgcgcagacgcatattatcatgaatgagaaaacgcctcctgaactgatcgaccgtatacgttacagagaaacacgtgccgaaccggccatcgtccatttctgcggcagcgacaagccttggaatacaggcacctcgcacccgtatcgtgatcattatttccgatatatgtcctttacgaaatggaacacgatcgaccgcccggccatgaaccaataggcaggtgtgatgaaaacgcttgtgaagccgttatccggctcataagcgttttttttattatttcacccgaatcgcacgcacgcgtttttgcaggccggtcttttcggcagacggcttcaatcggctgactgccgtttgcgccgctgattttgcttttttcgtcttggttttttcagccgcttttactttgtctctagcctgctgccggttgagtttatcttttatccggccaagccgtttatccagggcggttttttcttttcccggctggatttcgctgactgctttttgggcttttgcggtgttggcctcagaggtctttttttccgcctgcttgacgctggcctcagctgttttcaaaaggcttgagttgacagcgttaagccgcttttgcagtccttttttctctgaaccggccggtaatttgcgaatggcgctttgtgcggcattgacggcgttttttttcttttgtttttcggcagtccggactttgtctcttgcgtccgtcatatttcttgccgtctgaactttattgatccgggactcgagagcggtttttccctttgacttggacagcttgctgacggccgtttttgcttgattgatatctgcctgttttttcgtcttttccgcttttattacggcccgttcggcaaagctcttttgctttacgtgatattgcaccaggccgtacccaaatcggctgtcacgtccgggagcgcccagatctttgacgttttgctgcatctgctgccggagctgtgcatttgtttcctcgggatatttctgcctgagcagcgcgaacatgccggtgacgtgcggtgcggcttgagatgtgccgtcagctacggcgtacatttgattcaggtacgtgctcgtaatattggtgccgggtgcggcaaattcaatttgttttccggtcgtggaaaaagccgcgagcccgtttttttcagttgacgctgagactgccgttacgctgctgtaggcgcccggataattgacgggttttttgttgccgtcgtttcctgcggcggctacgatcacgattccttttttgtatgctttatctacggcgtcgtgaagaattttgctgtcagcgttagttccgagactcatattaatgatgtccattttattggcgatcgaccagtcgatcgctttaagaaggcttttaagatcccctgcaccctttctgtctaatgctttaaccgcatataaccggacatccggcgcgatgccgtcaatgccgtatccgtcatgtttggccgcaatgattccggcgacatgcgtcccgtgtccgttgtcatctttgtatgaggaagtatagctgactgcggaatagcctccggcaatggaaaggtcatcatgagggtaaatgccgctgtcaatgacagccactttcaccttttttcccgtcaagccttctttccacgcctgcttgacctgagtcggttctatatcccattgcggcagcgcgtaactgctgctttggaccgctgataacgggcggatatcagaaccgcctgctgcctgaaaggatacattgtcttctacatataagatgtcagggtcctgtttcaggtctttcaccgtttgtgaatcggctgacacggcgactgccgggagatgctgataggtctgttccacatccgctccgctgtctatagcggattccttgccgtcttgatttttgtacaccacgataacgtcccggtcgtgcgtctcggcgtgcgcgggcgccgcggcggagaacaggctgacgcacaaggccgcggccattatcggtttcagggtgtgatacattgcaattccccctttttctttatatatcggcagtgcggaattctttttttcctaagggataaggaaaatttctgtatgcaaatgtaagcgtttccaaaatatgatggagaaaatgctttaagacatctgcgcaataaactcaaaaagggggtttttgataaatgagtacgttcaatcgggtcatggaagaaaaaatcatgcctgtcgccggaaaagtcgccggccaaaggcacttaagagctttgcgggacggcattattttgactatgccccttatcatcatcggatcggtttttctgattctgacgagtcttccgattcccggttatgccgattttatggctggtcttttcggtgaaaattgggttgaaaagctcgggtatcccgtgaatgcgtcctttgacattatggcgcttgtcgccgcctttgggattgcttaccggcttgcggaaagctatgaggtggatgccctgtcgtcgggagccattgcccttgccgcctttttattggcgacgccgtatcagattccgtttattcctgacggctcggcaacagagattatggtgggaggcggcattccgatttcgctgctcggaagcaaaggtctgtttgttgcgatgatcattgcaatgctgtctacggaagtgtaccggtttatcatacaaagaaatatcgttattaagatgcctgacggagtgccgcctgcggtcagcaaatcgttcgttgcgctcatccccggtttcattgttattacgcttgtatggctggcccgtctgtttattgaaataactccttttaaaagcctccacaatgtcgtaggcgatctgctgggcaccccgctgtctattctgggcgggagtctcggcggaagtcttatcgccgaattcgtgcaaatgctgctttggtcgtgcggcatacacggcgcgtccattatcggcggcgtcatgtcgccgatctggtacggggcgatggacgccaaccgtttggcttttcaggcgggagaggcgcttccgagcatttttacgacacagttctttcaaatatggattaatgtcggcggaagcggagcgacgcttgcccttgtgctgaccatgcttgtgcgctccagaagcaaacagatgaaacagctcggccgtctcggcatcgggcccgcgatttttaacattaacgaaccgattattttcgggatgccgctcgtcatgaatccgctgttaatcgtgccctttatcattgcgccgctcttgaccattacagcgacgtacatcgggatgagcacggggatggtggcaaaaccggcgggaatcgccgtgccgtggacgatgccgccgctgatttccggttatttggcgacgggcgggaaaatctccggttcggtcatgcagctgatcaatctcctgattacatttatcatctattatccgtttttccgaatttgggatcttcaaaaatggagagaggagcgggcggcggaacaaaacgtcactgaagaaacataaaaaaaacgggcgccttcgcccgtttttttttaacgctggaaaaattcgatccattcgccgtcaggtccttcaatgtaaaagtagcggtacccgttcggaagcgttgtgatttcttcatcgataaatacggcgccctgacgcttcgcatgcgtgaactccgccgcgatatcttcagttaataaagcgacatgatggacttttccttctgcgggaagctcgctgctatagccctggatcagctcaatttctgtctccggcccttcctgaaagccgagaaaggcaagttcaataatgccgttcgtatgagtgatacgatcctttaactgcataccgagaacgtcttgataaaaggcaatggatgtttcaatatctttgaccataatgcctgtatggtcgattcttttggctgtcatggttttccccctgttttgaatttttcgggacaatgcggtgttgatcatgttttatggtacgataagagaaagcaaaacgaaagaggaatgcacaatgaagctacttacagtgaaagatacatttgccggaaagctgaaaaaaggattccccctgattgaaaaagacgctctgtccggaagctcggctcatttaacagagggcgatctttttgatgtgacatccgagaagggtgagtttatcggaaaaggctattacggcttgcagaataaaggagtcggctgggtgctgtcccgcgcgagagatgaacggatcgacggacgtttctttctggacaagctgaaaaaagcggctgaagcgagagcccatctgtttaaggcgcccgatacgacggcgttccggcttttcaacggtgagggcgacggcatcggcggcgtcacgattgacttttatgacggttatctgctgattcaatggtacagtaaaggcatttacgcttataaggacagcatgattgaggcgattgacggactggagctttcttataaagcgatctatgaaaagaaacgattcgatacggccgggcaatacgtggaagacgacgattttgtcaaaggcgaaagaggagattttccggtcattgttcaagaaaacggcatacagtacgcggtggatttaaacgacggggcgatgacgggcattttcttagaccagcgtcatgtgcgcaaagcgattcgggataagtatgcaaacggcagacgggtgctgaatacgttctcttatacgggggcattttccgtcgcggcggcgcttggcggagctgagaaaacgaccagcgtcgatgtcgccaaccgcagtctcgcaaaaacgattgaacagttcagcgccaacggaattgattatgaggcgcatgacattaaggtcatggatgttttcaaatacttcggctatgcggagaaaaaagggctggagtttgacctcatcatccttgatccgccttctttcgcccgcacaaaaaaacggacgttcagcgcggcgaaagattataaaaacctgctgaaggaaacgatcgccatcaccgcaaaaaacggcatcatcgtcgcttcgacaaacagcagcgccttcaatatgaagaaatttaaaggttttatagagaccgcctttaaagaaacaaatgagcgttacgacattttggaagaatatacgcttccggaagatttcaaaacgattcccgcgtttaaagaagggaactatttgaaggttgttttcttgcggaaaaaataggatgatcatttatagcgtggaaagaggggaaaagaaaaccctcttccatcgctttaatacgggataaaataatcttcattcttaaagaaataacccgctattacttagtatctcatctgtgccaagtaaagtggcctctctaatccccacattgttggctttcatgaaggattgcaccgcttggtagccaaccgcataacctgcaaacggtgataagccgacaggctgataaccttgttcggctgcaaaggtatcaccaaacatgtaactgctgacctcagcaaaccctttcacatttaatgagtctttgataatttcttttgagtattctaagtcttctttttcaaaagaagtaacccagggacctaacagagcttctccgtaaagttctttggcaaacgattctgccagcccctctataattaagtaatcaccaaccgttacgttcccataatcccaattgaaatacgaaaaacgaatattatgatgaaattcatgtgcgattacagcagacagtctcggtatgttatatgaattggggaatattgaaacttgaataaatcccggaattcctccgaatccacaataccctctatgtaattcaagctttttttgattggccagatacatcccaaaccttatttcatcagcatttatttttaagcggttttgtttgataaattctgcacaatgagttaaagtgccatatgcaatttgaagagcttgaatttcttttagattctctaatgcttttcttccggtttccgtatcaaatatgctcagatagcccagcatatttgtagccatgattacatcatatccgttaggttgctttgcctttaaggggacattaatctttttccacatatcttcaaaaggtttcatcattgaataccgataataatcttctctattttcaatcattgaaaataacgtttcgtattgcccaattgtatcctcgataatgattttaatgggtaccaccctttttttgatgatctatataaattgtaatggcatcactcatgagcttcgccagcccttcaccataccggtcaatgttcttagtgaagcgtttatcttcaatatagagttgacctaatccgtaaaaggcatcaaaagaatattcaccaaaattttcattgagaaaatcaaaccactctttgatagctgtttgtacgtctggggacttgggagattggttaataaggagtgcaaatttattaaacattgcagtccacttatcagataaatctttttgctcaccatcagtcatgcttttcaatctaatatttaccttatcgacaggttgatcaccccaccgtttgcgagcttcttgttcataaagattatgattgaagttcattccctcaaaccgctctttgttcgtcatgcaaatctctcccatcatatgtttgattgatttatcgatggtttcaatcatcttatcgactctattccgtttctcaatcaacattttcttttgtaaaattaatgcctcccttcgattaaatgaaggattattaatgatttctttaatctcttttaaggagaaatcgagctccttgaaaaatagtatctgctgcagctgttcaagattttcttcagaataaagccgataaccggaatcggtcgtttcctgaggagtcaataatccaatttgatcgtaatgatggagagtacgtatgcttactccaatcagttcagctacttcttttactttcatacccatcacgtttgccgcctccttaatggctactctaaagtattacgcaacgtaagagtcaatagttggttaaagattttttgtatataaaggggaacagatgaggatttcattgctgaaattaaagaaaaaaagccgggcgtgaagctccggcttttttctattcaataatgtgctgcacccggccgattcgcccgtcttcaaggcggaccttaatgccgcgcgggtggaagcttgagttcgtcaaaatatccttcacgattcctcttgtcagctttcctgaacgctgatcggctttcaggacgatatcgacttcaagtccttttctgatgctgcttcgctgctggccgttcatatgacacatccgttcttcagtcttttcacttcatatcttatcatatcgtgttttcgtctttttatgaaggacagacgaatcaatccttcatagcaaataaaaaaagaccgctctgtaaggagcagtcttttatgacataaacgaaagcaaaatcggggccgcgcacagcgtcataattgcggcgagaatcatggacacgcttgagatcgttcctgatacggagctgagctcaaatgctttagatgttcccgctccgtgcgcgctggttccgagcagcacgccccgggcaatttcgttatcaatgcggaaatagcggatgaccatcggcccgatgatcgttcccaataaagccgttaaaatgacgaaaaccgctgtaacggccggcatcccgccgatcatttctgaaacgttcatggcaatcggcgtcgtcacggatcgcggcacgagactgtcgactaagctgctgccgagatggaaccatttcgcgataaaggccgttgacagaatggcgatacatgaaccgaccgctacgttcaaaataatttccacggcgtatttctttaaaatcgggaaatatttataaagcgggatagcgaacgccactgttgccggctgaagcatatcggtcagcagtccgccgccgagattgtatgtctgatacgggacattgacaagaagcagcagtacgaccaaaacagcgggcgtaatcagaagcggcgacgtatacacccgcggaaaacgagtgtagagttttttcgcgcccaaatatactaagacagttaagaataaacttatgattccgatgaacacgtttgttttttctcctttctttttgctatcagctgtgtaagcgtacctgttgaaaccatcacgacaaatgtgctgatgacgacgacaagtaaaatgcttacgccgaatttagacataatatctccgtattcaatcactccgacggcagacgggatgaaaaacagcagcagctcaccgaggagccatgctgcgccaagctcaatccattcaagtttgataatcttgaaatgcaataatgtgaaaagaatcacaatcccgattatactgccgggaatatttatatgaagagccgccgtgacccaattgatcagacgcgcaaatataaacagcagagcgatttgaataacggtaagcagcaattttttcataatgatgcctcccttatatttatattgtacagaaggttttgctataggtaaaatacatataaagaataatgtgtattccttttgtctatagaaaggatgaaatgtaatggatatccggcacttaacgtattttttggaagtggcccgtttgaaaagctttacgaaggcttcacagtcgctgtatgtttcacagccgacaatctcaaagatgattaaaaacctggagacggagctcggcattaagctgttttaccgcaatggccggcaagttgaactgactgacgccgggcagagcatgtatgtgcaggcgcaggaaatcacaaagtcattccaaaacctgacgtcagagctgaacgatattatggaagtgaagaaagggcacgtccgcatcggtcttccgccgatgatcgggtccggctttttcccgagagtgctcggtgacttccgcgtcacatatcccgatgtgacgtttcagcttgttgaggacggctctattaaagtgcagcaaggggtggaggacggctcgcttgatatcggggtcgtcgtgcttcccgcgaatgaagagatttttcatacgttcacaatcgtcaaggaaacccttatgctcgtcgtccatccgtcacatcggctcgctgacgagaaagaatgcagtcttcacgaattgaaagaagagccattcatatttttcagggaggattttgtccttcataatcgaattatgacggaatgcgtgaaagccggattcaggccgcacgtcatttatgaaacgtcacagtgggactttatcagcgaaatggtatccgccaatctcggtatcggcctgctgccggaaagaatctgccgcggtcttgatcctgacaaagtcagaaccattccgctcgttcatccggtcattccgtggcatttagccatcatttggcggaaagaccgctatatgtcctttgccgccagagcctggctggagcatacgaaatcgtatttatggaatccgaaaaagagaaaaaaggatgattaagcatggacgcacaaaccgcagctcaacacttgagtaaagtgcgggatcaaaacccgctcgttcacagtatcaccaataatgtcgtcacgaacttcaccgctaacggactgctcgcgctcggcgcatcgcccgttatggcttatgcaattgaggaggccgccgacatggcgaaaatcgcaggagcgctcgtcctgaatataggcaccctcaattcggcgtcggttgaagctatgatcgcagccggaaaatcggccaatgaaaacggtgttccggtcatttttgatccggtaggcgcaggcgccacgccgtttcggacggcatcagcccgcaagatcatacaggaggtccgcttgtccgccattcgcggaaatgccgcggaaatcgccaatattgccggcgcccctgattggaagataaaaggcgtggatgcgggggaagccggaggagatgtggttcagctcgctaagacggctgcaagcgggctgaagacggtcattgcgattaccggaaaaaccgacgtcatctccgacggcgccgacacatacgccgtacataacggtgataaactgctgacgaaggtgacgggggcgggatgcctgctgacatctgtaatcggagccttctgcgcagcggagcaggacgttctgcaagcggccgtttcagccgtttctgtatacggaagcgccgctcagcttgccgctttggacacctcccaaaaggggccgggcagcttccagattgagcttttaaacaagctggcaagcatctcagaacaagaagcggccgagcttgctgcaattgaaagggtgacagaaaaatgacgcgtatttctcgggaaatgatgaaggatatgttatcggtttattttattatgggatcaaacaatacaagcgcagaccccgtttctgtggtgaaaaaagccattgagggcggcgctacgctttttcaatttcgggaaaaggggagcggttctttaacaggggatgaacgtgtcctgttcgcgaagcaggtgcaggatgtctgcaggcaggccgggattcctttcatcattaatgatgatgtcgaattggccttgcgccttcaggcggacggagtgcatatcggacaggatgacgcagacgccgaagaaacgagagcggcaatcggcgatatgattctcggtgtgtcagcacataacgtctccgaggtgaagcgggcggaagccgccggagccgattacgtcggaatgggcccggtctatccgaccgaaacaaaaaaagatgctgaagctgtgcagggcgttacattgattgaagaggtgcggcgtcagggcatcagcattccgattgtaggaatcggcggcattacggctgacaacgcggcgcccgtcattgaagcgggtgcagacggcgtcagcatgatcagcgccatcagccaagccgaagatccaaaagcggcggcgcgcaagttttcagaggaaattcggcactccaaagcagggctgtcccgatagggcggccctttttctgtgtgcgcaaaaaggcagtgacggacttggagaatataagccgtatgtcaagaacagggcaatcagcttgcaatatcgaccgaagtgtttgacggctctatcgcttcgctcaaagtaatgcctgaaccaatcaccgccggcgccgaaggcttaaaagccctctatgaaacagtgaaaagcgcgcatgtgaaagatcatttcgaggtcacggaaaaacttgatgcggaattcagcgaatttgaagttttgatgtcgaaatacaaaacgtgcgatcaatcgtatacgtcttgtgatacattaagtacagatcaaatcagagagataagcacgaagctgacggccctttctgaaaccatgtcgaagattgccgatgtgcttttaaaggagttaagacgcagcatgagcgatgaacaaaacaaggaaaaacagatccacagacgggatgtcctgaagtggggcgccgtcgcgggcgccgccgttgctgtcggagcgagcggcctcggaggactcgcgccgctcttcaaaccggcggccaccgcttcaaagaagaatgatgaaaaacgtgatcgtgatcaaatcgttcctttttacggaaagcaccaagcaggaatcacaacggcgcatcagacgtatgtgtattttgcagcgcttgatgtcatgtcaagcgacaaagccgatgtcatctcccttttcaaacaatggacaagcctgacgcagctgctgacttcaggcgccgtcccgtcgggcgaacagaaaaataaatatatacctccgcaggataccggggagtcgcaggatctggccccggcgaatttgaccgttaccttcggcttcggccccgggtttttcgagaaagacgggagggaccgcttcggactgaaagataaaaaaccgaagcatctcgccgatattccgccgatgcctaacgacaagctcgataagaaacaaggcggcggtgatatcgtcatacaggtctgcgcggataatgaacaaacggcgtttcacgcggtgcgcaacctgatgaaacaggcagcaggcgtgtgcgaagtccgctttctcaataaaggtttcttaagcggcgggaaaaacggggaaacgccgcgcaacctcttcggattcaaagacggcaccggcaaccaaagcacaaaggatgaaaacctgatgaattcgatcgtttgggttcaatcaggtgagccggactggatgacgggcggcacgtacatggcgtttaggaaaattaagatgtttttagatatatgggaccgttcatccttgaaggaacaagaggacacgttcgggcgggtgaaaagctcgggcgcgcctttcggacaaaaaaaggaaaacgatcccgtgaagctgaatcaaattcccgccgactcgcatgtcagcgtggcaaaatcaaccggcagacagattctgcgccgggcattttcctatacggacggaattgatccgaaaacgggctatgttgacgcaggcctgctgtttatctgctttcaaaaagacccggaccgccaatttgtcccgatgctgaaggctttggcggcaaaggatgcactgaatgaatacacacaaacgatcggctcttccttattcgcctgtcccggcggctgtaaaaaaggagaatatatcgcccaaaggctgctggaatcgtgacaccttccatatggagggtgtttttaaaaaaacacttgtaactatatatgttacaacttaaaatgaaaaggaaaggagacttacaatgacactgcagattaaagtatattctgattatgtatgtccgttttgctttgtcggcaaagcggcgtttgaagaagcaatcaaggacaaggacgtacaggtggaatggatgccgtttgaattgcgtccgagcccctcgccgaaacttgatccggtgaatgatcccgccaagcggcagatgtggaaaaactccattgagccgatggcgcagtctttaggcgttgaaatcacgttcccccgcgtgtcaccgcatccttacacggatttggcatttgaaggctttcatttcgcaaaggaacatgggaaaggaagcgaataccatacacgcgtttttcaggcgttctttcaggaagaacaaaatatcggtgacgttggcgtgctgacaaagcttgcggaagaagccggacttgacggcgctgcctttaaagaggcgcttgagacaagagcgtacagacacgtacagcgggaagcgctccgccatgcttatgaggaagccggcattacggcagtgccgacgtttatcatcggcgatgagagaatccctggcgcggcggggaaggaaacctttgaacaaatcattgagcgggaactgaataaacgttaacccgaaaaaagccctctcgatcagcgagagggctttgccatatagtgtttgacaaatgtttgtctgtccgcttcatatgccgcggcgtcaaatgagtcgccgcaaaaatgaaggcaccaagggtctttttggcaggcgacgccgacttgatagccgtgtttttgaaattcaagcgactgtgatgtgtcgtaaaaatgaaagccgcgaaacaaatcctcccgccactccacgtcatattgagccgccattaacaagccgtcaatggcgtcagcgggcgtaaacagtccgtcttcatcaccgtgctcaaagaccagtgggtgataagcattcccccggtattcaatcacttttcccacccgctctccgctttcccaccaaatgccgttcggcggcagggttttgcagccggcgacaccgagaaggccgagctcctgatgagattgaaagatatgaagcatatcatgaaggaaatgctgatgaatgataaaggtatcctgatgcagataaattttatatttggaggggtgtctcagcgctttgttgtaggacgaggccatgcttgctgaatcgtatatcggcaagatatcaacggagtatgaaggggggacggtaagctgcatgatatggcttttgcaccgggagtacagcgactcgtcattcacacagacgacaaacagaaatgaatgtgaatccattacatgctcctctcggcctcaatcacatattgatacgccgatgcttctgtcataaagtcatgccttatgccaagctgtacgcatacttcgtgcaatgatgcgatggctttgtgataagaggggtgatcaacgcggatcgcctcaatgcgtttcacctcatagccggcggctttaaataatgaaagcgtctcttcacgggtaaaaaaacgcaggtgggtctgatccattaatccggcgtccctgtaagtccatttgccggctaaaagctccagcaccactgagatgtggccgacattcggtatgcatgcaagcaccgtgccgtctttttttacatacgggcgaagctttttcagcacggaccacgggtcgataagatgctcaagaacgtctccgaacagcatgcagtcgaattgttctgattcgtacggaagaatggcggattcaatgtcgccgcaaagcacgtggctcaatttgctttccgccttttttgcggcttcgggatacgcttcaatgccgtaaaccgttattccgcggtcttcgatcgccgctcctaaattgcctgtgccgcagccgacatcaagcactgtccgccagttttcgtctattttgttcaataaataaggattcaggccttcgtagtagttctgttgtttttcatcataatagggattcgtatccatctgtgtatcacctcataaatgggcatatacacaagatatgcagcggggggatctcatatcaccatgtttggctgttcaattgcggaatgcggacgggaatggttgtccggtatacggtttgttctctgattcccctcttattgcggatgttcctttgaaaactcgggtgcgggcggactgtggcaggtcatatagtaaaaggatccgcctgtaatcttaccgctggcggatggtgtttttcattggtgtttttttcttcaccgctttttcagtatttaagaagcgcctcacatcgtcaatgtgcaaacccatgattctagcctcttgaattaacaattgccaatcttgatctatatctttcattacatgagttttcataagaacctccaattgaaaaattgatttgcccagctacagcagccaatgtataacaaatatcacacatagttggccggtaatcccaaattgaagatgaattcacctacctattccctaagaaaatgactgaaataaccaaaatccttcaagaattcttacgtataataataaacaaataaatactgactggatagtatgcaaataaaaataaatcatatgacctattaatatttaccctcaaagcgtcgactagcatattctttttgcataaaaaataccgcaaaagaatgattcggtgtaagataaagtgaatgatcaaacagctggggtaaaaaatgaaaaaaaacaaatttcaaattaagagagaagaaacatttgaaagttttattgacgcaggccttcatctcctgattgaaagagcttacgattcagtctcaatcgatgacatcagtaaagcggcgggtttcagcaaaggcgcgttttacgttcattttgaaagcaaggaagattttctgaagcatttgttagacaggcgtcagattaaaaaaaggatcattactggctatctcgacgaattagaaaagcaaacagcacggccgttgacgctttgtgaagctgcggcaagcgcggccagcctgttgatgcggtttgtaaacagcaagccagcctggaatgttgtgtcttttgccgttcatatgcctacttacaaagtcgtcagtgaatatgaagcttatatccgtctttataagttatggatagaagaaagcaccatgtacataaattggctcaaatcgagaaatttaatagaagaccatatagataccgagcataccgctaacatgatgtgcgcgctcatcgacgggatgattaagcaatccaatgtgctgggaaggccggttactttccgcagcatgtttgacgcgctctatgtttttgtcagcggcagaaaatcggggtaacgttcttcttgatttgacaaaaggtttagaaaagtctttcagaaagcgaggaactgccatgcgctacagagaaattatgatgtatatcattatggggatattcacgaccatcgtgaatatcgtcagtttttacattctgacgtcggcctttgagatggattacaaggcggcgaccgtcgctgcttggattctgtccgttctatttgcatatgtcacgaataaactgtatgtatttcagcaaaagaccgcggggatgcggagtctgatgaaagaattgacggcctttttcagcgtgcgggtattgtctctcgccatcgatctcgccatgatgattcttctggtcagtcaatttcatatgaacgaaacgttggcgaaaatcgccgataacgtcattatcgtagtcgtcaactatgcggccagcaagtggattgtcttcagaaaagcgaaagaagagggcgtgtcataacggtttctttccgcgccccgggggaaagtgtaatggtgaaaggggatgcgtatgaagcacaaaataaagaaagcgtttgctgatgtattcggggaatcggaggacctgcgcattttctttgcgcccggcagagtgaatctcatcggagagcatacggattataacgggggccacgtctttccgtgcgcgctgacgatcggtacatatgcagccgtccgggagagaggggacaggctcgtcagaatgtactctcatcaatttaaggaagcgggcataaaggaatgcagtctcgatgatatccgttatcaaaaagaggacgggtgggccaactatccgaaaggggtcatggcggaatgtctcggcagcggtttttcccttccgcacggcttcgatattgtgttctggggaaacatcccgaacggagcggggctgtcctcttcggcttccattgaacttgttacggcggtcattctcaaggaatgccatgagcttgaggcggatatgctcgacttggtgaagctcgctcagacggcggaaaattcctttatcggcgtcagctgcggaataatggatcaattcgccatcggaatgggaaagaaacatcatgcgattctgctgaattgcgggacgctcagctttgaatatacaaaactcgggctgtcggggctgtcgatcgttattgcaaataccaataaaaaacgaacgcttgcagactcaggctataatacgaggctcaaggagtgcggggaagcgctttgtgatcttcagaagcatctttccgttcaatcactgggagagctgaccccttccgcctttgacgctcatgcggagctgattcagaatgaagtgaacagacgccgggcgaaacacgccgtctatgaaaatcaccgcacaatagaggcagccgacatgttcagtaacaatcagcttcatcatatcggtgaattaatgagggattcgcatctctctttacgcgatgactacgaggtgacgagtcatgagctggatacactggctgaagcggcctggcgccacggcggggtgatcggatcaaggatgacgggagccggtttcggcggctgtacagtcagtatcgtcaaggacgatgcggtttcggattttattgaaacaacaggagcccgctatgaggaaaagacagggagaaaagctgacttttacacggcggatgtcggagccggagcgagagaactaaagggggatgacgatggcaattgagcggcatgtggaacgtttaatccggtacggattgcaaaaagagctgatttcctatcttgatattgaatatacaagaaaccgtttatatgaagctttgcatatcacccatccggaagtttcagaacagaaagaaaatgaatcggcggcatcattgccggacatattggccccgatttatgaatgggcggcagaaacgggccggattgcagccgatacagacacctatcgcgacctgttgagcgcgaagatcatgggctgctttgccccgcagccgtccgagattgtccgtcgttttgaagaaacaaaggcggtgcacgggccggagcaggcgacaaaggcgttttaccgattttcagaggatgtgtattatatccgttcggacagaatacagcggaatgtcgggtggacggctgagacggcttacggaaagctggacatcacgatcaacctttcaaaaccggaaaaagatccgaaagcaattgcggctgccaaagagcagcctcaatccgattatccgagatgtgttctttgtaaagaaaatgtcgggtacgaggggagaccggatcacccggcgcgtcaaaaccttcgtgtcattccggtgattctcggcgatgagcagtggtttctgcaatattctccgtatgtgtattaccgggagcattgcatcgttttgaaagaccggcacgaaccgatgaagatcagtaaaaaaacgtttgaccggctgctgtcgttcgtcagccagtatcctcattattttctcggttccaatgctgatctgccgattgtcggcggcagtattttaagccacgaccattttcaggggggcaattatgaattcccgatggcgcgggcggagacagaaagccggtacaggctgcctgactatccgaaaacggtgttgggaattgtgaagtggccgatgtcggtcatccgcctgcaaagcgagagtgcgtctgagctttccggcgcggcggatgccatcctgcgggcatggcgcggttattccgatgaggcggctgatctcctcgcctattcaggagaaacaccgcacaatacaattacgccgattgcccggcggaaaaaaggtttattcgaattagatctcgtcctcagaaataaccgcacctctgatgagcatccgctgggaatttttcatccccatcaggaagttcatcacctgaaaaaagaaaatatcggactgattgaggtaatggggcttgcgattctgccgggccgccttgaacaagaaatgaaatacacggctgaagcgctgtgctcaccgaatccggaagcggtcttaacggcagacccttctgcggcagcgcataaagattgggcgctcagtgtgctgcataagcggaagataacgaaagaaaacgcggaacagattctgaaagaggaaatcggccatgcctttgcgcggatactggagcatgccggcgtctttaaacagacagaagaaggcagagcggctttccggcggtttatccgccatttgggcgctctaccggaaaaaagcctcatcccataagggacgaggcttttttttatcctctgcttctggcgatcaggctgaataagaataccacgatcgcagctccgatgattgccggaatgatggcaaagccggcaaggtgaggaccccatgtgccgagcagtccgtgcccgatccatgcgccgatcagaccagcgatcattgacccgatgattcctccgggcatactgccttttacaaataaacttccgatccagccgataataatagcgacaatcagagatacgataaaacccataaatatcacttcctattttttatttatttatgcctatatgttaccttcgttttgtccatattaaacatatgaatgcgttttttataatgaacatatcaaggcgcgttccggtcttttttttcacaatgcgttgcgttaaaatggaaaccgtgtgaaaaggtgtgagcaaaggaaaaaatatttcttttgtagaatgtttaacaaaatgaaactttttgttgaccagcgttttttattatggtaaacctttatttggtattattcgttctcactatcttttttctctatatatgctaaatgatctaaaactttttatgtttgatttgcgcaagtggaaaaagttcatgcattttttgacgattttgtgacattaggtcgaaaaaaagatgaactttagaaaaaaataaagctaataagggcagattttgatagcataacaaggtagatagagaaaagattttgagaaagtacatttcagattcactacatcaataggaaggatggtgatcttcttgttcagagcatttaaaccgttacttttaatagcgatgttggctgttgttttcgtactgggcggatgcagcgacatttccgttttagatccgaaaggacctgtagcagaccagcagaaagatctgattctcttgtcaatcggatttatgctgttcattgtcggcgtcgtattcgtactatttacaatcattttagtgaaataccgcgaccgcaaaggcaaagacagcggaaattacaagcccgagatgcacggcaacacgttcttagaagtagtctggacagtgatcccaattttaattgttattgcactttctgtgcctaccgtacagacgatatattcgttagaaaaagcgcctgaagcgacaaaggataaagagcctcttgttgtttatgctacttcggtagactggaaatgggtattcagctacccagagcaggatattgagacggttaactacctgaacattcctgtagaccgtccggttttatttaaaatttcttcagccgattcaatggcatcgctatggattcctcagcttgggggacaaaaatacgcgatggcgggaatgctgatggatcaatacttacaggctgacaaagtgggaacatatgaaggccgcaacgcgaacttcaccggcgaacactttgccgaccagaaattcaacgtaaaagctgttacgcaaaaagactttaacagctgggtgaaaaaagcccaaagcgattctccaaagctgacgaaagagaagtatgacgaactgatgcttccggagaatgtcggtaaattaacgttctcttctacacacttaaaatacgttgaccacggccaagatgccgaatatgcgatggaggcgcgcaaacgccttggctacaaagccgtatcaccgcactctaaaacagatccgtgggaaaatgtaaagaaaaacgaatttaaagtatccgacgataaacaagattgaaattgaacaagaaaggaggaagcccgaatgaaattgagatgggatgaattttttgtaacaggtgacccattaattctgggcgcacaagtttccattgcgctttccactattgctatcatcgttgtactcacatacttcaaaaagtggaagtggctctggtctgaatggcttacgtctgtagaccataagaaacttggaatcatgtacattatctctgctgttatcatgctgttccgcggcggggtcgacggcttgatgatgcgcgcccagttagcgcttcctaataacagttttttagactcaaaccactataatgagatctttacgactcacggtacgatcatgattatcttcatggcgatgccgtttttaatcggtctgatcaacgttgtcgtacctttgcagatcggtgcgcgcgacgtagcattcccttacttgaacaacctgagtttctggacgttcttcgtaggtgcgatgcttttcaatatttctttcgttatcggaggttctccgaacgcaggctggacgagttacatgccgctggcaagcaacgacatgagtcccgggcctggtgagaacttctacctgctcggtcttcagattgccggtatcggtacgctgatgacgggtatcaactttatggtgacgatcctgaaaatgcgtacgaaaggcatgacgctgatgcgtatgccgatgttcacatggacgacgctgattacaatggttattatcgtattcgccttccctgttttgacagtggcattggcgctgttatcatttgaccgtttgttcggcgctcactttttcacgctggaagccggcggtatgccgatgctttgggctaacttgttctggatttggggacaccctgaagtatatatcgttatcttaccggcattcggtattttctctgaaattatttcagcgtttgcaagaaagcagttattcggttacaaagcgatggtcggctcaattatcgccatttccgtcctgagtttccttgtatggactcaccacttcttcacaatggggaacagtgcgtccgttaactctttcttctcgattacaacgatggcgatttcggttccgaccggggttaaaatctttaactggctctttacgatgtataaaggccggatcagttttacaacaccgatgctgtgggcgcttgcgttcatcccgaacttcgttgtcggcggggtaacaggggttatgcttgcgatggctgcagcggattatcaataccataatacgtacttcctcgtatctcacttccactatgtgctgatcgcgggtacggtatttgcatgtttcgcaggatttattttctggtatccgaaaatgttcggccacaagctgaacgaaagaatcggaaaatggttcttctggatctttatgatcggatttaatgtatgtttcttccctcaatacttcttggggctgcaaggtatgcctcgccgtatttacacttacggaccgaatgacggatggactgcattgaactttatttcaactgtcggagccttcatgatgggtgtcggattcttaatcctttgctacaacatctactacagcttccgctactctactcgcgagatcagcggagattcatggggcgtgggacgtacgcttgagtgggcgacttcatctgcgattccgccgcattacaactttgcggtgcttcctgaagtgaaatctcaagatgcgttactgcaattgaaagaagacaaaacggatattcatccggaaagcaagttcaagaaaatccatatgccgcacaactccggaagaccgcttattatgtcagtggcgttcggtattgcaggcttcggacttgtatttgaatggttctggatgggcattgtcggtttgatcggcattctgctttgcatggtgcttcgttcatttgaatatgacaatggctactatatacctgttgaagaaataaaagagacggaaagaaagatttccgaataaaggaggcgtgatttatggaacatgcagaacacggcaattctaacgcgcctatggaatatcaatctgaaaccggcagactcaatattctcgggttttggatctttttaggggcagagattgtgttgttctcaacactatttgcaaccttcttcgttcttcaaagaagaacagcaggaggagtcttaccggctgaattatttgaagtgaagcttgtcatgatcatgacattcctgcttctgatcagcagtttcacctgcgggatcgctgttcatgaaatgcgtcgcggaagtttaaaaggcgtcgtcatttggacgatcattacgctccttctcggcgcgggcttcgtcggatgtgagcttaacgagttcatccactatgtacatgaaggagcatctctcggtacaagtgctttctggtctggattcttcgtccttctgggaacgcacggaacgcacgtaacgatcggtatcttctggattgccggcatcttactgcaattgaagaaacgcggattaacgccgcagacgtcttcaaaaatctttatctcaagtttatactggcacttcttagacgttgtttggatcttcatctttacaggcgtctatctcatcggattggggggactataatatggcaaacaaatctgctgaacacagccactttccgtggaagcatatcgtaggttttgcgttgtctattattctgaccctgctggccctttgggttgcggtatatacggatttaagctcatcagcaaaactctggatcattttcggcttcgcatttatccaagccggtcttcagcttctcatgttcatgcacatgacagaaagcgaaaacggcggaattcaagtcggaaacacgctcttcggatttttcggagcgattgttatcatccttggttccatctggatctttgcggcgcactaccatcacggtgaccatatggatggaaaccctcctggcggtgcgaagcaacattccgaacatcaggaataaaaagaaaccctcttcgatcaggcgaagagggttttttgtgcctttattggcttcttctccggcgcaggcgcggaaggccgtaaatgataaaggcggcgatatgggcaacgatgacgttgacggcaaacaggatgatcatgagtgtgtggccgagaggggataggctgctggttgcgtaaaagtagaagaaaacccacatgagaataattggcggtatggccgaaagagcgacttttttgttatccagccagataaagaggggtgttgcgcttgcgaccagtaaataagcaaaaaacatgtccatcttacatgtctcctttcactttatgggagcgtttccaaaatgaaatacagagaatgaaatgtgtctgttttgtggtcgttttttgaacattttgttacaattattataccatgttttccaatttttgataccgctttttcgagaaatgtattgcaactattgcctcatttttggataggtacaagaaaccggaaaggccaaataccctgtcacaattccggacaatagaatggcgcaggctgtgaacctttgctatggtcaaagaaaatatgcacagcaagggtggtttgaagtggacgtaaggaaagaagatgtcactgcgccggatgtcattgcgcttttgcaggatcatctgaagagcatgaccatgctttctcctccggaaagtatacacgcgctcaatgcggaccggctgcgtcagcctgacgttacgttttggagtgtgagggaagacggtgtcctgctcggctgcggtgccttaaaggagctaaacagcctgcacggtgagatcaaatcaatgagaacctctccgcatcatgtcagaaaaggcgttgccaaccggatcctccgccatatgcttgaagaagcaaagcggcggggctatcagcggatcagcttggaaaccggttctatggaggcttttctccccgccagacgcctgtatgaaaaagccgggtttcaatattgtaatccgtttgcacattataaagaggacccgaacagcttgtttatgacgttaaacatagactgaaaccccttttctgacgagaaggggttttttatcggaaaagtttcgtcatgaccgaaacatttccttttctgacacgtcatatgtcgtgtagtccccaaaccgtaaaaaataaaaaggaagcaacctcatcatgttttcttgaacagtgttcatgtataataaacaatagtgacttccgatgaaaatgtaaggcgggatagaatgagtcgatataagaaacagcaaaatccctattatcagggggatttgatttttatatttggtgtgtttttaataattagtgttgcggcgatttatgcggccggacagttcgggcagtacggaagtgatgcctggatgagacagatcgtcttttatgtcatcggagccggtctcatggtcagtattatgtattttgatttagagcagcttgaaaaactgagtctgtacgtgttaattgccggcgtgctgtcgctgctccttttgcgtgtggcgccggaatccatcgcgccgattaaaaacggagcgaagagctggtttaaaatcggcagcttcactcttcaaccttcagagttcacgaaaataggaattatgatgatggtcgcgtccattatatcgaaggcgggcccgaaggatcaaaggtcacttcgggaagatgtgaatctgcttttgaaaattgcggcatggacggttattccgatcgggatgatcgtcttgcaggatgccggaacgggtgcgatctgtctgtttatcgttatggtgatggtgtttatgtcaggtgtgaactggaagctgatcaccatcatcggcggttcggccgcgcttgtgcttggccttttcttagttctcgtgattgaatttccccatgtggcgaattcaatcggcattgcggattatcaaattaaccggattacatcgtggatgtctgactccagtgcggcaacgactcaggcagagagcgataaaagctggcaggtggatcaggccgttatggcgatcggatcgggcggcattaccggaaacggcgttcataatctgaaggtgtacgtacctgagggacagaccgactttatctttgcgattttgggtgaaagttttggatttttaggctgcgccattgcggttgtcatgtttttctttttaatttacagacttgtggtgctgattgaccgcttgcatgcgtttaaccgatttggcgcgtttttttgcgtagggttcactgcacttattgttatccatacattccagaacatcgggatgaatatcggcattatgccggttaccggtattccgctgctgtttgtcagctatggggggagctcggtgctttctacattaatcagcttcgggatcgtatataacgcaagtgtgcagctgacgaaatataaaagctacttgttcaattcttaatgtgagacggctcgtttttcgggctgtctttttttgtttagagcatttcgcttttgacatgattccctttcggatatgatatagagagaaggaggcttttatatgaacaataccatcgaaactatacttaatcatcggtcgatccgatcatttactgacgagcttctgacagcagaagagatagatacattagtgaaaagcgcccaggcggcgtcaacgtccagttacgtgcaggcttactccatcatcggcgtaaccgataaggagaaaaagcggaagctggcggcgctggccggaaaccagccttacgtcgaaaataacgggcacttgtttgtgttttgcgctgatttgtaccgccataaaaaacttgctgaggaaaaaggcgaaaacattaccgagcttcttgagaatacggaaatgtttatggtcagcgtcattgatgccgcacttgccgcacaaaatgtaagtgttgccgcggaatcaatggggcttggcatttgttatatcggaggcattcgaaatgaacttgatcaggtgacggaagtgcttggtacacctgaccatgtgctgccgctgttcggcttggtagtcggtcatcccgctcatccgtccggtcaaaagccgcgcctgccgaaacaagccgtatatcatgaaaacacgtacgatacgaatgaagaacacttccgcagttatatgaaggaatatgatgaaaccatttccgcttattatgataaacggacaaacggcaagcggattgaaacgtggtctgatcaaatcctgcagttcatgaaacaaaaaccgagaacctatttaaatcaatatgtaaaagataaaggttttcaaaagaattaagaaaaaacctctcctgaccgggagaggtttttttatgtttcacgtgtaacatatttcgacaaaatggaacaaggtatataaatgtttatcatcagggatgcttataagcatacagaaagaaaaaacggcttagcagtggtacgatgttgatgaggtgacagtgatgatttcattaagtatattggatcaatctcctgtatcagaagggagttccgcggaaagtgctctgcggaatacagtaagactggcgcaggaggcggaaaagctcggatataagaggttttgggtgtcagagcatcatttttcagagcggttggcgggttcaagccctgaagtgctgatcagccatattgcggcgaaaacgaatgagattcgtgtaggatcgggcggtgtcatgcttccgcattacagcgcatataaggtggcggagaatttccgcgtgcttgaagggttgacgccgggcagaatcgatctcggattagggagagcgccgggcggaatgccgatcgcatcatgggcgctgaatgacggcgggaagcgtaacgctgatcaatatccgcagcagcttcgtgagctggcgatgtatttgcatgatgcagccgacgacaatcaccgttttccgaatctcacggcatcaccccttattaagacggcgccggaagtctggcttctcggttcttcgggggaaagcgcgcttctgagcgcagaaacgggagcaggctatatgtttgcccactttattaatggagaaggcggagaaagcacgacggcacaatataagcgcagatttaaaccttctctattaggaaaagaaccaaaaacagccgtggcggtgtttgtgctgtgcgcggacacggaagagaaatcggaggaactcgcggccgtcatggattatacgctgcttgcgggtgaacaggggattccgcttcacggcgtaccgtcttacgaaaccgtccgcggaaatacgtatacaccgtatgaacaaagacgaattgccgataatcggaaccgaatgatcatcggaacgaagccgcaagtgaaagaacagattctggctctcagtaaagcatacggaacggaagaagtgatggctgtaaccattactcatcattttgaagataaacttcagtcatatcgcctgcttcgagaagcttttgccgaatgatcagaaagaaaccctgctgatgctccagcagggttgttcggttattcaatgataaaaggtttttcagtcagcacctggcttgatttccctttgttcgcggcataggccagcatataatattctcctgccggcagtgcggtgtcaccattgactttgccgttccagtcgaaatattgatagcctttatcctgctttttgtagatgccggcttggccgacaaagtcaagattgctgtcatatacaaggaaggcaagctcttcggctcccgccggaagataggtttcaatttggtaggttccctgcgttgtgccgtcctgcacgtcgattgacgtcacgcgcggatagtccggctcttttacaatcagcagcgtcggcacttttgcgactgtttttccgccttcacgcactgtgacggttccctcataggtgcctgcctttacttttttggcattgacctttactttggcattgacctttccggtttgatgagcggggatcacgacccggtctgtgcccgaaacggtaatgcccgtgccgttgaaagagtactcgagctgatatgattttctgatggacgattggttttcaatcgtaaaggtttcttttttcgtttcattgcctttgtctttcataaacgttccgtaagaataacttcccggggcgacaagggagtctgctttgatcgccttcatgattctgatgcttccggtgccttgcgcattatgcgggtatacgtcaccgtccgcgtctgttaaggtttccgcggtgttcatgagagcggcttttatttgttccgggctccatttcggtttggcctgcttgatgacggcagctgcgccggctacatgcggggaagccatgctcgttccctgcttcgatccgtagccgtacgggtcggccggatcatgtgtcggaatagtgctgacgatatttacgccgggagcggagacgtcaggtttaatcatccacgtgtccataaccggaccgcgtgacgaaaagtctgccatttgttcagtgagcgatttagccacggataaattgaaagtcgcttttgtgccgcccgcttttaattggctgacgagtttttcgccgtcttctgatgaaagcttaatcgtcggcacggacatgcccggtacgttggcttcaatttctcccggggcattgttatacacaaccataccgatcgcgcccgcttttttggcgttgtcggctttatccacaaaggcgatgctgccccgtttgacgacagcgacttttcctttcagatctttgccttcaaaatccttttgctcgccgatacccgcctctatgagctctgtttcttttttattcagtgcttttatgtcatcttctttgttgtagcccattactttcgctgaggaataggaaccgaaggagacggcgtactcgttcagcggcagctgggtcgctccgacggagatcgcttctctggacgttcccggagagccgacggtccaattgttcggcccgctgtttccgtttgatgtaacggccgtgacgccttctgacatcgcccagtcaagcgccgtgcttgtcgcccagtctgggttattcacagaattgccgagagaaaggttcatgacatccgctccgtcctgtacggcgcgttcgatgccggcgatgacgttttccgttgttccgcttccgcccggaccgagcacacggtaggcaaggagtgtagcatccggtgcgacgcctttaatcgttccgtttgccgctaccgtgcccgcgacatgggttccgtggtcagtcgacgcgcctctcggatcaccggacggcgtttcttcaggatcgtagtcgttatccacaaaatcgtatcctttatattgtccgaaatttttctttaagtcagggtgtttatattcgacaccggtgtcaataatggcaaccttgacgcctttacccgtatagccgagcttccacgcgtcatttgcccctatataaggcgcgctgtcatccatctgcggagacacggcatctttagatagggtaatgtctttatctttgagctgatcggtatgataggtgacattcggataaaccgctttgacatcctgatcactcagcagtttggggatttcatttgccgggagtttcatggagaagccggaaaacacttgctcatattctctgttgatttttccgtgtttaacggttttgagcgctttctttttcacttttgcgcgttcgcttttcagcttgctttttgtctgtgctttgccgagttcctttgcttccgccagtgacttttctttcagctccacgatgactgtcgtttgtttgccggtggtcatatcaatgtcaccgaacacctcagccttctcaagatccggagtttgcggttttgaagccggcgcagcctgtgaacttgtggataaggtaaaggataagacaaaagccggaagcagataacggatgattccttttttcaatcgtgtttccccctttttctttatctaaattagaaatctagtatatatttcttgaaaattcaaaataatccttgtgacatatgactcatttatggaaattggtctgtgaataaggagggagttatacacagaatcctgtgcataactgaataaatttgtgtatatatattgttgggaacgagtgttcctatacaaaatatagatcaagtttgtggatatgtggatataccctgtgtttaagctgtgcttaaccaagggataaattgtgtataactttttttatcggcttttccatttttcaggtcatttccatcagctttcaacaaaacttctgaaaactagtttgttttttcactcatattgtgacaaacaattcgcccggccgcgtctatcatagagtcatagggttgctagacccgctagtttttagcggagaaggatcggccgccttttccgttaaagcggagagaaaaacaggcctgcgaacaagctgtctgtcaaaaagaagcggagggatgatttgcaatgaaacgtttgctagtatctttacgggtgtggatggtctttctgatgaactggatggcgccgggtaacggaagatatccattagccgccgtgtacggaaaccaagcggcttatcataagaaagcgaagcggacggctggggctttttcgtttgtgagccgtgtccgatcggcggatttgaccgatgaaacaaaatcggcccgcggcaggctggataaaaaccgatggatgcctgtccgcaaagaattgccgaaacgggagcgcgcgggtccgacacctttacatcatatgaaaaagagggtacaatcccactaaacataagaacgggagcgaacctcttgagaatagacaaagtattaaataacaatgcggcgttaataaaagaagacggacgggaaaagatcgtaatgggtcccggaatcgcttttcaaaagagaaaaaatgatgtgattcaaaaacataaaattgaaaaaatatttgtcgtgcacgacgaaaatgaaaagttcaaacaagtgttagaaacgcttcccgaagagcatatagaggcggctgaagatatcatcagccatgcggagggagagcttgcggcacctttgagcgatcacatccacattgcgctggcggaccatttatcctttgcgatcgaaaggattcaaaacggccttcaggtgcataaccgattgcttcatgaaattaaggcgctttataaaaaagaatatgagatcggccgctgggcggttgaacacgtgaaacaaaccctcggtatatcattgcctgatgatgaggcggggtatatcgcgcttcatatccacactgccaaggcggatgccaaaagcatgtattcggcgatgaagcatacaaccatgatcaaagaaatgatcgaaaagatcgaatcctttttcgaacagaaggtggatgaagacagtatttcctatcagcgcctcgtcacgcacttgcggtatgcggtcagccggttggactcaaatgaagcactccattccatggacgaggagatgctttatttcatccaaaaaaagtatccgtttgcttatcggtgtgcgcttgaactggcggcgtttttaaaaactgaatatgatttggaactgccggaatccgaggccggctatattacgctgcatgtccagcgtctgcaaaaaaacccggaataacgcgtctgtttcgagaaacagactttttttatgaaaacatattgacgaaagcgctgtcatgaaatagaatgaaagcgcattaaaaaaactgaatccggcgggattgtgactggtaatgcaggcaagacctaaaatttgcgtacatgaaaaagggatcatgctgacctttttcgttggcgaattttaggtcttttttgattttagaaagggggatacataatgaattatcaagaaacggcaaaacagcttatcaaacatatcggaggggaatcaaatatcatcagcgcgacacattgcgcgacgcggctcaggctcgtcattcaagatgaacagaagatcagccaggccggcattgaagaaatagaaggcgtaaaaggggctttcagcagctcggggcaatatcagattatattcggcaccggcctcgtgaataaagtgtatgacgctttttcaaaagaagccgatttggggcgggaggatcgtgagacacatcaggacgcagcgaaaaaaaagctgaatccggccgcaagatttgcgaagacactgtctaacatattcgttcccatcattccggctatcgtggcaagcggacttttaatggggctgctcggcatgatgaaggcttttcactgggtgtctgaacaatcatcgctgtttaagcttttagacatgttttcaagcgcggcgtttatcttcctgcccgtattcatcgggttcagcgcggcgaaggaatttggcggtaatgcctatctcggtgccgtgctcgggggaattatgatccatccggcgcttttgaatccgtgggggcttgcggatgcatcgcctgattttatgcagctcttcggcttcgacattgcgctgctcggctaccaagggacggtcatccccgtactgttagccgtttacattatgagcaaagtggaaaagggcacgagaaaaattgtgcctcacgcattcgatttattggtcacgccgtttgtcacggtgattgtcacaggatttattacctttatcgcaatcggtccgcttggcagggcgatcggatcaggcattaccgtctcgctgacatatgtgtatgatcatgctggcattgttgccggactgcttttcggcggtctttatccgcttattgtgcttaccggtgtgcatcacagctttcatgcgattgaggccggcctcatcgctgatttgggcagaaactatatccttcctatctggtcgatggcgaatgtcgctcagggtgcggcgggactggctgtatttttcctgacgaaaaaagcgaaaatgaaagaaatcgctctgcctgccgcattttccgcttttctcggcgtaaccgaaccagtcattttcggtgtgaacctaaggtaccgtaagccgtttatcgcgggaatgatcggcggagcgctgggaggagcctatgtcgtggtgaccggcgtcgccgccaatgcctacggtctgaccggaattccgatgattgccatcacggctccgctcggtttaggaaatcttataaactatctgatcggaatgggcatcgcctctgtctcggcgtttattgccgcttacattatgggagctaaagaaaaggaggccgtcaaatgaggacaccggatcaagagctgcgcctgcaggctgaggaagcgaaaaagaagcggggagaaacagccgcgtcagatccataccgccagaactatcatattatgccgtcggtcgggcttttaaatgatccgaacggcgtgatccaatggaacggcgtatatcacttgttttttcaatggcagccatttcatacggggcatggcgcgaaattttgggcgcatgtgacgacgaaggatttcgttgagtggaaagaggaagaaatcgcgcttgcgccgggtgagtggtatgacaaaaacggctgttattccggaagcgccatcgaaaaagacgggcggctctgcctgatgtacacaggcaatgtccgtgacgaagaaggcaatcgggaaacgtatcaatgcctcgccgtatccgaagacgggatcgcatttgaaaaaaaaggagtcgtcgcgcgtctcccggaaggctataccgctcatttccgtgatccgaaggtttggaagaaagacggagcgtattacatggtgctcggcgcgcagacagaaaagctcaccggaagcgctgtattgttcacatcagagaacttgacggattggacgtttctcggtgcgattgcgggggcggactccggcggtctcgggtcattcggctatatgtgggaatgtcccgacctgttttcccttgagggaaccgacgtgctgctcgtatgtccgcaggggcttgaagccgacgggataaaatatcataacagccaccaggcgggctatttcctcggcaggctgcatacagagccgccagagtttaagcatggtgaatttacggagcttgacagaggatttgatttttatgcggcgcagacgctggaagatgataagggacggagaattctgttcgcgtggatgggcgttccggatcagcatgaggacaaacatccgacacatgcgtatcactgggttcactgcttaacgatgccgagacagctgtcactgtccaacggcagaatcatacagcgcccgctgccggaaatgaaatcacgccgcacggatgaacaaaagcgccggcttcaattgaattgctcgtctgtaagcctcccggtgaaagatgcgtcccgggctgaagtgctgctggaagacatcacttgcgaatccggttttgaaatctcaattcggggcgcagcccggtttatatttcatcaggaagagggactggctgtgctggaacgcaccgctttcagcggagaagaaaaagaaacgagaagctgcgccatcggcgaggtgcattctgtgcagctgtttctggatgcatcctcgattgaattgtttttaaatgatggagaagaggtattcagcgccagatattttcctttcccgggaaatgatgacgtaaccgtcacttcggtaggaaaaacggaaataaatggatcaatttggacacttttgtagaaaatcgttcttttttcttatgtgaaacctatgccatctgtgctattcttcaaacgaaagcctatgattccaggaataaaaggagttgttttctcagttttgaaaaatcagaagatgacgccgaaatgtttacttgtcaaagccgcagagcaagtggaagataagcgggaagaatataaagaagtattgcttcagctgaatcgcatgctcaagagagctgagccgcacaatgaatggagtgatcggctaatgcatacatatgaacagatgaaggaatatgcgctgtttgtgcagtctattgagacgtttttgcggtcatccgcgaaaaaaatgaaataatccccctcgatcatgagggggatatttattttattttccgctaagacgcatcgccgaatgtttagtcggtccgatgtattggttcagcgggaaggattctttgattgccgcggtgataaattcttttgccgcatagatggcttccttcacttcagcgcctttggccagttctgccgtcacggcggcggagaatgtgcatccggctccgtgtgtgtaaggtgtatcaatcatttcgctttctaatacttccgcggtttctccgtcatacagcacgtcgatcgctttttcatgttttaatttgcctccgcctgtaatcaatacatatttcgcgccgagttcgtgaattttcttggccgcttctttcatgtcttccactgtttttaattcatccataccgctcagctggcttgcttcaaacaggtttggcgtgatgacggttgccagcggggccaattgggtgcgaagcgcttcggcatgctccggatacagcacttcgttcgctcctttgcagaccatgacaggatcgataacgacattcttcagctgtttttctttaatcgttttcgccgcaagctctatgatctccacggtagggagcattcccgttttcatggcgtctacgccgattccgtcaacaatcgtcgccagctgtgcgcgaatcgtatcggcatcgatcggaaatacttgatgatcccagctgttctccgggtccatcgctacgatcacggtcaaagccgtcattccgtatacgtttttttcttgaaatgtttttaaatcggcctgaattcccgcgccgccgctggaatcagaaccggcaatagtaagtgctttgtgcattgacatatcaatggcctccatcagtgttttatatctcattatagttagattttctcccgatcacaatacggaaggcttggaggaatgatttgacagccgcgggggctgtgcgtacaatacctacataagaatactaggtaagggtgagaaaataaatgctcaacagggagcttgtaaagggaagcacggtcattctggtgctgacgctgctgaatgaacggcccatgtacgggtatgaacttgtgaaagaaatggagaaaagaagcgggaatgaactgcaaatgaaggaaggcacgctgtacccatcgcttcataagcttgaacgccaaagctatatttcttcttactgggaaaagcagaccaaagggccggaccgaaaatattaccggatcaccgatgaaggaaagaccattctagccgaacggacgaaggaatggaatctgttctctgctctgatggaccggatgctgaagcggggcgggcagaatggataaggacctttatgtgcaggaaatcagaaaagggctggaaggcaaggccggaagccgtgaattattaaaagaaatcgaaagccatattcatcatgccatatgtgatcatctggaaaaaggcaaaaccgaaagcgaagcgatggcgcttattctgcgggaagtggggactccgtctgaaattatctctgcttttcaaaaagcttcggcggtgcccgcgcggacttttatgctcttttatctgttctgcaactgcggtctttttgtgatgggggcgttgattacgatgatgcacgcgtggcggattcatcccgctgttgacgcgctgtggaaagggatttccatgtcagtatggctgattatgatcggttatgtgctgtattggttccaaatcggctatcaagctggcaaagagttcggggctggcggaaaaaagcttgctgagcggacggtatggacttcaatggtgccgaatctatgttttatgtttgtctttttgttcaatctggttccggctgggctgtttccttcggcggtcacaccgagttttgcggcagtatgcgccgttgtgacggtatgttttccgttttgcggcaaaataggtttttacgcaggcaggcagagacttgcctgatctttttcactatatacatagggaatctatataggggtgttaaaatgagattaggttcgtggatgtacggcgcgtgcgcccaaatagccgttaccgtatttaccgtctgcggcttggttcttgcattgcccgttgtaagtctttttattatggttctgaatgggatgcaagacgctatttttgttgttttcagtattttgcttcttctattgttttatgcgctgggatggatttgggccgtttcgtttgcgcgtgagtggaaggtgaaacttttcgagctgcagatcagttcgctcattccgctggcgggtatattatacttgtacattgacagcggggtgagtataccggaactgattcatgattgggatgaggatggatgtgcgcttgtcccgccggcttttgtctgcttgtgcacatgctatgcgatggtgttggtgcctgtttatcaatcaaaactttggaacgccatggaggcgggcagatttaatgccaaggcggtatgcactgtttggggagaccttctgatcattctcgttttgctggcgggcatgacctggatttgtttctgaatgggcagaaatcaaaaatcccccctgatctctccgccgctttatgttttaatagaacatgagaaaaagcagaaggagcgggtcatgaatatatcaattgtcatagtcacgtataaccggattccggctttgtgtgagctgctggagtcgatttccatgcagaccataaagccttatgaagtgatcattgtaaatgatgccggggaatcggtcgaacaagcgaagcagctgtacagcgatctgccgattcagattattgatttagaacagaatgccggacatgtggaagcgcggaacgcaggtgtgaaaaaagcgtcgggtgattatatcatgctgtccgatgatgatgatttcattacgccgggccatttggaaagaatggcggctgcacttgctgatgcggattttgtccattctgacgcggaaattgtgtcatttgaagaacggggcggcacgagatacccggtgtcacgaaagcctttcgcctatacggcggattatgcggatatgcgggtattttccacgtacgttccgtcaggcagcatgtacaggcgttctctgcatgacacgttagggtattttgatccggatgtccataattattgggactgggacttttatttgcgcgccgcaaaacagcactgtgtgaagcgtgttccttgcgcgagcgtcatatatgcgttttttgagggaggcggcaatcagtccgcggatctcggcggcaaacggaagcggtacttagaccggttaagcgaaaagcacgggcttggggagctcccgacgaaaaacttcgcggttcttcttgaagagccggacatgaagaggcgggaggcgccgactgacattgtgtgggacggaaagcccgtccattcaagactgcacagttaagggggacggacagtttgaaacagcttttaaaagacagctggtggaatcagctgaaagatgaatttgacaaaccgtattatcaagagctgagagaaatgctgaaacaagaatacagcagccaaacgatttatcctgacagccatgatatttttaacgccttgcattatacgccctatgaggatgtaaaagcggtcattctcggacaggacccgtatcatggaccaggacaggcgcacgggcttagtttttccgttcagcccggggtcagacagccgccgtctttgaaaaatattttcatagagcttcaggacgatatcggctgctccgtaccgaaccacggatcgctcgtcagctgggcgaagcagggagtgcttttgttaaacacagtgcttacggttcgccgcggtcaggccaattcccacaaaggcaagggatgggagcggctcactgaccgcatcattgatgtggtgaatgaaagagagaagccgattgtctttatcctgtgggggcgtcacgcgcagatgaaaaaagagcgcattgacacatcgaaacacattattattgaatcgactcatccgagcccgttttcggcaaggaacggttttttcgggagcagaccgttttcccgtacaaacgccgcccttgaaaaaatgggggagcagccgatcgattggtgcatccccgacctgccgcaataaacgtttttttgaggcgcttccgcccggcggaagcgtcttttttgacgttcagggcgatatgccgtcagaaaaaataacaaactcaattctgcgattcgctcagaaatttgataaaatgcaggaagaagacaaattactgctggaggatttactcatgaacatacatatctctgctttgattcagaagatggaagaagaactgaggcaggcgaaaacggcgacccgcaccgaggaggtcaaaatgcacgcggccgccatccgctctctgtgtgatgtcgtgctcggcactcagacgcacaccgctccggcgcctgtgcagaatccgattccgaaagcggcgccgaaaccttccgcgtctccttcgacagacccgctgctgcttgaaaaaatgatgggcagcgccgggctgaaccaatatcagaaaaaagcgaaagacgaacgtgaggaagacggaaacggggattccattttcgatttttaacaggagaggttgattgacttgaaactgatactcgggggtttgcaatggacggcatttatgattgcggctgcgattgtagttcctgtcgccatcgcacaatcatttcacttgaaccatgccgattctgccgcattgattcagagcacattttttgtgcttggcgtcgccgcggtcatccaatgtctccagggacatcgtctgccgattaatgaaagcccggcaggcttatggtggggcgtatacacgatttacggcggactgactggcacggtgttcgcgacattcggcgagacgctgcgggcgctgcagggggcgctgttattaagcgctgtatttttctttttgttcagcctttttaaagtgattgaacggctggccgtgctgtttacgccggttgtgaccggtgtgtatctgctgctgttggtcatgcagctgagtcagccgattgtgaaaggccttttgggcatcggctatttaaaaaacagcgtcgacggccttgtattcgggctcgccatggttgtgacggcggcgatgttcatcatgtcccgatcgaatgttacgttcttaagacagtatgcgattctcctttcgcttgccggcggatggatcttattcgccgtcttcggcgctgccaaaccgattcaaataccggaccgcgtgattcagctgccggctctttttccgtttggaaaacccgtgtttgacagcggcctgatcattacgtcactcttcattaccgtgcttttgattgtcaatatgctcgcgagcatccgggttgtagaagcggcggtgaaaaaattcggcggcaccgtcgggaagcggcgtgagcgtccggcagggtttgcggcttcgatcagccaccttttgagcggactgtcaggaggcattgcgcctgtgccgatttcaggggcggccggttttattgagacgacgaagcttccttcgaaaaagccgtttcttttgggaagtgtatttgtcatgatcatcagtatgatcccgctatttatgaatgcgttcgcgagtctgccctcaccggtcggctttgcggtaaacttcgtcgttttctccacgatggcgggtcttgcctttacagagtttgactcttatgagaaagcggagcaaaaacgaatccgctccattatcggtctggcgctcctgacgggggtcggcgtaatgtttgtgccggagagcgcgttatcagggatgcacccgatcctgatttcgctcttaagcaacggtcttgtgctcgggacgctgctggcgatagcgattgaccgaatccagcttatcaaaaagaaaaaatccgacaatctcgtgtcatcggacggcggacgttgaattttgccgatgttgggttatgattgaattggaaactttaacgaaaaggcgggagaaaaatagatgaaagtgtttattattcttggtgcgattaacgctttattggccgtggcgctgggcgctttcggcgcgcatgggcttgaagggaaaatccccgataaatatttgcaggtgtggcacacaggcgtgcaatatcatatgtatcacgcgctcggtcttctggctgtcgcgtttttggccgaaaagctctctggcgcaggcagtgtttctgttgcgggctggctgatgtttgcgggcatcgttctgttttcaggaagcctgtacgtattgagcgtgacgcagatttccattctcggcgcgattacaccgctcggcggcgtggcgtttatcatctcttggattatgattatcgtcgcggccgtcaaatatttataaagaaaaaaagccaatcctctgtcaagtgagcgattggctttttgatttatctcggcgaataagaagacatggagtacggataagtataagcgatttcctcatcaaacgtgatgtaatcaaggtaaatggtcagaagcagatagcgggtgcccgttttcggatcgctgatgatgatatggtcacgtcccgctgcctgaatcacaccgcggaaaatctttgaattccattctttgctgttttcaaatgtcatataaatcgtcgccgttttgccccggttcaaccgcagaatattttcaatgtatgactcttcaatcggcagcatgccgggaacgttttgtgacgatgatggacctgacgggatttgaaagctgccgccgccctgctgctgcggctggccggggaaccccccgccgaagctctgctggccttgctgcatcggcattgtcatttgctgctgcatcggcatcatttgtgatccttggccctgtggctgcggataagggttaggcccgagctgcggctggtatccttgcatatccattcccatccccatcccttgcatttgctgatattgattctttttcggtttcatattgttcctcctttgatgaaaacctcttgatgctgaaacctcctgaaaagtatcagacagccgacagagaggctgctgtttttatctattccaccatatgagcccaaagaaagatttatgcggaaaaagaaaatacgctccaataagtccggacatcagagccggctttttttgtgcgcgcaatgctgacttttcacataatagtctgtattcctagcgcatcttccgcataaggaacatatgatagcggtagtttcaggtgcgaaaagggggtgacgagttgcctaaagtgtcagtgatcatgacgagctataacaaaagtgactatgtggcccgctctattaaaagtattctgtctcagacgtttacggactttgagctgttcattatggatgacaactcaaatgaagcgacattggcggaaatacgtccttttctcacggatgaccgcgtccggttttatcaaagcgatgtatcgggcgtcaaagaaagaacggaaaaaacacgctacgccgccttgattaatcaggcaatagaaatggcggagggcgagtacgtgacgtatgcgaccgacgacaacacgtatgtgccggaacggcttgagaaaatggtgaaagagcttgatgaagacccggaaaaagccgtcgtgtattcaagttccaaaacctatcatctgaatcagcggaaagagacggtgaaggagacggccaggcccgccgaacggatcgtgtggaacgcgccgtgcgccattgaccattgttcggtcatgcaccggttttccgtgctggaacaggtcaaatcggcattcggttcctattgggatgaaagccccgcgttttaccggatcggtgacgcccgtttcttctggagagtgaatcatttttatccgttttacccgatttctgaggagcttgatatcaattatattaccgatcaatccatccattatcagcttttcgcggcggagaaaaacgagtttgtgaacagccttccgcagcagaccacgtgccgggagctgagggaatcattaaaaaagcttggaaaggggtgagggcttgtcggcatacttagcgaactattgggtgctgtaccggcagtatattgacctttttcagtcacttcgctacaaagacatcccgctcgcattgatcagtaatttttatcaatatatcagtccggcgcttcgggagagcatggagcagaacccagagcttttcggtccggctgatcagcatattcctgaagccggtatacagccatattatgatcaaaaaaggcaaaacattaagaaaacagatgagaaaccggtaaacggaaaagtcattctgcatttcgatcatcttcggttcaccgagggaaactaccggcagtttgatccggcaaaaacagcggtactggccagatggagtctgcctgaccattacgggctgcccgttatctgcaaattggagctgacggaaatggggcaaaaagggaaccccgtcccttatattgaaaaagcccattccattttgaaagagcttcacagccatcccgctttcggaaacagagaatttcaggaacgtttgtataaagacattccattatttattgaagcgattgatgccgttgatattttgtttacggccgagaagatttccgccgttgtagtcggcacgacagaggatatttacagccgtgtgctggcgctgatgtcagcgaaaaaaaacgccgtcagcatctgtctgcagcacggagcgctcatgggagatgaagcgtttctgcccgtatttacggactatcaggctgtattcggggcttatgaagcggagtggtataaagcaaaagggtgcagggatgaacaaatcatcatcacgggccatccccgtttcgacgagattttctcaagagaaccgatagatcaagatacgttttaccgcaaactttcttttctcccgtcacagcggacggtgctgatcgccacgcagccgttttctgatgaattttatacgggagtgcttgaagagcttgccggccaaaagaacatgcagctcattattaaaccgcatccgtgggaaatcggcaaaaacaagctggatgcttacaatcaggtgctgcggaaatataaagcaggaaaaatcatcaaaaaagagatggagctgtatgacattctcccgtatgttgacgctgcggtgactcagacatcaacggtcggtcttgaagcgatgctgtttcaaaagcccgtgctgatcggaaaatcagcgggaacccacagatacccttattatcactcacttggagaatttgtctttgaggacccgcaggcactcgctcaggaagtaatccggatatgcgaataccccgcagaatatcaaaaagcggaacaggcgcgccgtgcttttgtcgccgcgaactacccggttcaggattcgattgccgctttatgccaagtgcttcaggaaaaaaccggagtcagcttcagacgggttgacccttcataaaaaagataggagcgcaaagaaaatggtgcaaaaaagatcagcatttcttccctattcattgcccatgatcgggaaggacgaaattcaggaggttattgatacgcttgaatcgggctggctttcaaagggaccgaaagtagaggcgtttgaaaaagcctttgctgcctggacgggggcaaagcacgcgatcgcgctgaactcatgtaccgccgctttgtttttggccctgaaagcgaaagggatcggtcccggcgacgaggtcatcacgtctgccgtgacgttcagttcaacagccaatacaatcgtgcacacaggcgccgttccggtgtttgttgacatcgatccgcttacgctgaatgcggaccctgaaaaaattgaggcggccgtcaccccgcggacaaaagcgattgtacccgttcatttcgccggccagtcgtgtgatatggatcggattctggccaccgccgaaaagcatcagctgtttgtcttagaggatgccgcacatgccgtgtataccacgtataaacagaaaatgatcggatcaatcggtgatgcgacggcattcagcttctacgcgacaaaaaacctggcaaccggtgaaggcggcatgctgacgacgaacgatgacgggcttgccgatcagatcagggtgctcagccttcacggcatgagcaaaggcgcgtggaaccgctattcttcaaacggaagctggtactacgaggtcgaaacgcccggctataaaatgaatatgtttgatcttcaggcagcgcttgggcttcatcagctgaaacggattgacagcatgcagcaaagaagagccgacattgcgagccgctaccaggacgccttcagaaacatgaaagggctgaccatcccgcatgtcagtgatgacgggcggcatgcatggcatctgtatgttcttcaaatagaggagcaggaggccggggtcagccggaacgatctgatttccgctttaaaagaccaatataatatcggcacaagtgttcattttattccggttccgttccatccgtattatcaaaaaacgtacgggtataaggaaactgactttccggccgcggcagcgtattatcaccgcaccgtgtcactccctctttatccgtcaatgacagatgacgacgttgaatacgtcattgcagccgttacggatatcgtcaaaggggctgattaggtgtacagactgagggaaaatcttgcgcaggacatgattcatgccttcctgcatcagaagggcatccagccggaagcctatgaatcgtcgctctgtttattggaagaaaacagccttcaaggcgtgattttatatgaaaactcttcgtgggaaagtcaattgttccgaaaaaatatcatcaatgtgaagcttgcagccgcaaacagcaccggacagctcaaaaggctgtttcaggcattttacgcggcaaggcgggcggcaggcactgattttatatttattaaaataccggctgaagatatcggcacgatgcaggtcgttcagcagcttccgaacgcttattttgtagggagtctgctcaaactcgtcagcccggtgcgtgtatataacagcacgccgccatttgagattacagaagctggacccggcgacacggaagcgatcagacggctggcccgcgacgcctttataaaaagcaggtattaccaagacccccatctcagctatgaaagtgcaaaccgcctgtttgaagagtgggcgcggaataacgcggaaggcagagcttcgttacaattcgccgccacatataagggagagaccgtgggctttgttcaggggctgtctaaaggcgatgaattcgtccttgatctgatggcggtaaagccgggatttgaaggaaaaggagcgggattccatttagcggcgcacgtgattgaacaatcattgcgctttcagcataagactgtatcagcgggaacgcagctccacaatgtaagagccatccgcctgtatgaaagaatgggatttaaagcggatgcgtcctattactactatcacgtgtggcccgggaaggaggcggactgatggcatcatgcaaaatcggaacgaagtcaatcggcgaaggttcgcccgtattcatcatcgccgaagccggaattaatcatgacggaaaactgggccaggcgtttgaattgatagatgcggccagtgaggccggcgcggacgcggtcaagttccaaatgtttcaggctgacaaaatgtatcagaaagaccccggcttgtacaaaaccgctgcgggaaaagatgtctcgatattttctttggtgcaatcaatggaaatgcccgccgaatggatcgaaccgctgcttgaatattgtaagaaaaaaggcgtgctgtttttaagcacggtctgtgacgaaggctctgccgacttactgtatgcgacttcgccttcagcctttaaaatcgcctcctacgagctgaaccatctgccgttattgaaatatgtcgcggggctgaagaccccaattatcttttccaccgctggcgctgatatttcagatattcaggaggcttatcaaaccattaccggcgaggggaacacagaaattgcgatcatgcattgtgtggcgaaatatcccgcgccgcctgaatacagcaatctgagcgtcattcccatgcttgccgccgcattcccggatgcagtgatcggtttctccgatcacagcgcccatccgtatgatgtgccgtgcgcggcggtcaggctcggagcgaaactgattgaaaagcattttacgatcgataaaaacctgcccggtgctgatcactccttcgccctcaatccggatgaattaaaagaaatggttgcggcgatccgctcggttgaagcggagctgcggcaggggcatcacgctccggtgccggaagtgctgtcgggaagctcccataaaaccacgacaccgattgaaggagatatcagaaggttcgcttacagaggcattttttcaacagcgccgattcaaaaaggcgaatgttttacggctgaaaaccttgccgtccttcgtcccggccaaaaaccgcaggggctccacccgagatattttgagcttttaactgacggcgcgcgtgcggtcagggatatccccgccgacacgggcatcacttgggatgaccttttgacgaaaggcagcccatatgatgactgacattttgtttatcattcaggcgcggatgggaagcgggcgtcttcccggcaaagtgctgaaaccgatcggcgggtatacgatcctcgatatgattgtcaaaagggttcggcaaagcgcgtattatgatcaatcacgggataatctgattgtcgcctcgtctgacagcaagaccgacgacattctgtctgcgcactgcctcagcaagaactaccgtgtgcaccgcggcagcgaacagtgtgtgcttgaccggtttgcacaagtcatcgaacaagtaaaaccggacatcgcagtcagactgacgggggataacccgtttgtcgacccttcgctgcttgattttctgattcaatcgcatttagatcagcacgcagactacacgtatatctgcggtacaccgctcggcatcggcggtgaggcggtaaaagcgcgccttttaacagagatcaatgccgacaaaacgctggcggacaaatatcaggagcatgtcacgcttttaataagagaatctcctgagaagtaccagctcctctttcctgagcccccgcaggaactccgggccccccacttgcggatgaccgtcgataccgaagaggactacaggctggcccgcgagctgtacgtaaaagcgggctcgcgtcctgatattccggcaaaagaattgatccatctgctgaatcgtgatccggagctcagggccattaatcaaatgatccggcaaaaagaggctgattagcatgcgggttttgattttcgcggacgggggccgtgacatcggcatggggcatgcggtgcggatgaagctgcttgccggtgccattaagaacaattgctcaataacgttctacacaaataaagaggcttcttcttatctgtcttctgatcaatgggaagtgaacatcaagcctgacaagggacagaaggaatttattgtccgggaaataaacaggcaggctcctgaccttctcatattcgatctgctcgatatgccgtgtgactggttagaggaaatcaaaaagcattcatcggcgcgcatcgtcttatttgaagaaaaacgggaacatgtcattcatttatgcgatgccgttataaacggcatttacggagggctgaaaagccggacggttcaaatgggcagcgccgcggtatatgaaggcccggaatatatcattcttcatccgggttttgaaaaagccaaacagctttatcagctgaataaagaatgccgtaccatattggtctcattaggaggaagcgacccgaagaagcttgtctttaaagtgatggaagcatgccgcagcatccccggcattcagcgaaaacgagtgatcatcgtcatgggcggcgccgcgcctcatgctgatgacgtgcgcgcgcatcttacacaaatgccgtatgccgagatggtaaggcagacaaatgacatggccgcgcttctttcgagggctgatatggccgtcgtgtccggcgggatcactttatatgaaaccatttgtacaggtgtgccctgcattgtactttctcaagtggagcatcaaactgagacggcggaaaaattcgccgcacggggggccgccgttcacctcggccttggtgaatgcatatcagcggacgttctcgcacggcatatgtctgacatggccgctgattatccgctgcggaccggacttcatcaaaacggaaagccgctggttgacggcaggggcatcaaacgggcggcggcgattctttatgatttgtgataaaaccacacgtaaggaagtgttcatgtgaaaggtgttatcttagccggaggcaccggctcacgccttatgccgctgacaaaagcggtcaataagcatttactccctgtcggtccatatccgatgatttactggtcggtcatgaagctggaagaagcggggattacagatatcttgctgattacgcaaaaagaatatattccgcaatttcataaacttctcgaaaccggagaagagctcggcgtctcaatcacatatcaggttcagccagccgcatccggcatttccgacggtttatcatacgcaaagcggtttaccgggcgcgatccgttcgttctgcttttgggagataatatttttgaagattcattaaaaccttatacggagcgtttcgcaaagcagggaaaaggagcaaaagtgctgctgaaagaagtggacgatccggagcgcttcggcatcgccgagattgatgaggaaaacaaacggatcaagtcgatcattgaaaagccggagcagccgccgaccagactatgcgtcacagggatctacatgtacgacgcagaagtgttttcttatattgaacaaatttccccttcaaaacgcggcgaactggaaattacggatgtcaataatttatacattgaacacagtgagctgacgtatgatgtgttaacgggctggtgggtggatgcgggcacgcatgaatcgctctacctcgccggaagcctggcgcatcaggcattacagaaaggacaggagcattaatcatgccaaaatcatatttaattacagggggcgccggatttatcggccttaccttcacaaagatgatgctgaaagaaacagatgcgcagattaccgtcctggataatctcacgtatgcaagcaggccgcttgaaatagaagccttaaaaaagaacggccgttttcgttttatcaaaggtgacatttctaaaaaagaggacattgacaaagtcttttcccaaatgtatgacgctgtcattcattttgcggctgaatcccatgtggacagaagcataaatcaggcagagccgttcattacaacaaatgtaatgggcacataccgactggcggacgcagtgttacagggaaaagccggcaggctgattcacatttccacagatgaggtgtacggagatttggcgccggatgatcccgcttttacagagacgacgccgctttctccgaacaatccgtattcggccagcaaggcaagctcagacctgctcgtcatgtcttatgtgagaacccataagcttcctgccattattacaagatgcagcaacaattacgggccgtaccagcatcacgagaaaatgattccgaccattatcaggcatgccataaacggcacgccggttccgctgtacggcgacgggatgcagatcagagactggctgtttgccgaagatcattgccgcgccattaagctcgtgctggaaaaaggaacactcggtgacatttacaatatcggcggaggaaatgaacggacgaataaagagcttgcgtcatttatcatgaaggagctcggtgtcgaggaacggtttgctcatgtcgaagacagaaaagggcatgaccgccgttacgccatcaatgcttcaaagctgaaaaatgagctggggtggcggcaggacgtcacatttgaagaaggaatgagaagaaccattcgctggtatacagacagccaagactaatcggaaagaaggggatccgattgacgaaggtattagtaaccggagcggccggccagctggggcgggagttatgccgccagctgaagcgggaagggtatgaagtgatcgccttgacaaaagcgatgatgaacatatccgaccagcgttcggtgcggcactcgttcagccattacaagccggatatcgtcgtcaatacggcggcatacacctccgttgacaaatgtgaaacggagctcgacaaagcgtatttaataaacggaatcggcgcttattatgccgcgcttgaggctgaaaacaccggcgcgaaattcattcacatcagcaccgattacgtcttcagcggcaaaggaacacggccataccagaccgatgatcccgcagatccgggcacgatttacggaaaaagcaaaaaactcggcgaagaactgatccggttaacggggaaaaaccacaccattatcagaacatcgtgggtgtacggcagcggcgggcacaactttgtcaatacgatgctgaagcttgcggatacacatgatcaggtgcgtgtcgttaacgatcaagtcggagcgccgacgtatacaaaagatttagccgaaacggtgatcggtctgtttgacaggccgccgggcttataccacgccgcaaatagcggagtgtgcagctggtatgaatttgccaaggctatttttgaagaaagcggcagaaccgcctccgtgctgcccgtcacgacggaggaatacggaaatgagacgccgcgccccgcttattcggtgttgagtcttgagtcgattgaacggcaggggctcggcatgaggcattggcgggaagcgctgcgggattatttacaaagggagggacagtgcaagtgatcgaaggcgtaaaaatcaaaaagctgatcaaacacagcgatgaccggggttttttctcagaactcgtccgtgacgatgaacatctcttagagcgtttcgggcaggcttcctggtccaaaagctatcccggcgtcattaaagcgtttcactatcatgagaaacaggatgacctgtggtttttcccgacgggccacgcccaggtcgtgctccatgaccttcgcgaagagtcggcaaccaagggagaaacggatgtctactacatgggagaagacaatccgatgctccttctcattcccaaaggcgtcgcacatgggtacagagtgctgggcgaaaccccgctgaccattatttatttcacgacaatgtcctacaatccggatcagcctgacgaaaaaagaatcccatggaatgatgacaccatcggatttgactggcagacggctcaccgatagcgcacaagacgaagacagcggatgtcttcgtttttgtgtttttgttgactttgatatgagtggagccagtgaataagatacgaccgctcaccatatcatgattgctggcctgaagaacaatttcatcaaaaatgtcttggaagatggcggtcagttagggacctgaaatttaagagatcctccctttcttctcctatggacatcatgcatcctaaaaaaacaaaaaatgatttatagaatggggataggatttaattagaaaaatcttaagaaaaaagtaatatttgcttaagagaaaagagaactttcctttatatagtaggagtatatatggaaaggggaaagcgaatgacatacatcttaaaaacgagtcagcttacaaaaacatttaaaggaaaagaagttgtttccggggttaatatgcacgtgaaaaaaggggagatttatggattcttgggtcccaatggtgcaggtaaaacaaccattatgaaaatgattacaaatttaatcaagcctacaagtggtgaaatagaaattttcggtgagaaattaacagatacgtcatttgaagttttaaaaagaatgggcaccattattgaatatcccattttctatgacaacctcactgctaaagaaaatttagatttccattgtgaatatatgggctattacgataaaaaatccattgaccacgctatcgagcttgtaaagttacataatattgataataaaaaagtgaaagagttttctttaggaatgaaacaaagattaggaatagccagagctatttctacaagaccagaacttctcattttagacgagccgattaatggcctggatccaataggtataaaagagttgagggatctctttaagttactttgcagagaatatggaattacattattagtctccagtcacattttagccgaaatggaacaaatgtcagatactgttggtatcatacagaatgggaagttaataaaagaagtttctatgaagagtataaacggaaaacaaacagagtatatagaggtaaaagtccaaaatataaaaaaagcgttatatattttagagcaaaatctggggataagaaattttaaaatgattgatcaacaattaattcgtatctatgaaacagcagttacacaacaagaaatctctaaagcacttattctgaatgacattggtatagaaagtataaataaaaaacacagttctttagaagaatacttcttaaattctatgaatggggagggaatacacactagatagattgcccgtctgtgttatgcacctatttgcattgtcttaaattcttctgctggaggctattagcatgttaaaacttatgaaattagagtacaaaaaacatcacttatcacagtattttaaatgggtggcactttggatattcatcatctttgccttagcggcttttatgggatgggaatctaaaaatgaaaatgaacttatgtttcgtgattatgcagattttatatctctaactaatattttaattagaattgtgtttattagtttttctgctgtgattttatcccgtttagttattgatgaatataaaaataaaacaatacaattgctgtttacttatcctttacaaagaaaaaaattaatgcaagctaaactatctattgtcttcctattctgctttgtaagtattgttattgctacgtttgttattaacttgttaattctcttcgtgagtccgcacttatatttattcgagaagcctgttgaaatgagtgaagttatttccgctatgccatcgactcttctcaccgcttttatgatgggaggagtgagtctgattcctttatttttcggcatgagaaaaaaatcaacttctgctacaatcacttgggctgtcataatcggggtctttatcaatgcaacagtttccgacggaggagaaacagtcagtttaagtcaatttattatcattccaattacactttgtttatttggttttttagtgggttatctttcttaccgtaaggtggatcagaaagatttattgtagataaaaggataaattatacaatgaagaagattatagcatcatgtgcagtgttaatcgtaatcggcggaattgttttaagcctttataagatagatactaaaaactttaaaaagaacgtgtcctgcaatgttgaaaaaattgatactttaaaagtatatactgactcatgggatgtgaagtttaaaaagagtaattcaaataaggcaacaatatctgctgaggggaagcagaaagataaggctccagttacatttcaaggagatgggggggatttggtcgttagtcaaaaagaacaaaagaatggcggctttttggatggatttacttttgggaagcagggcggcacaatctatattaatgttcccgattcaggtatgaacaatattgaaataaccaataaagatgggagtatacaattaagtgaaatttcagctgaaaatattgtcgttgataatcattccggtgatgaaaaaatcaataatgtttcggctcatactggaaagttttcatccaaggatggggcgttaagcgttgaaaatagttcttttgagaaattaaatataacatctgcaagcggcgataacgagatgaaggaaatacatagttccaatgtaaaggttacttctaaagatggagcggtttcaatcaaggacacaacagaaggaaaatctttaaaatacgaaatcaggagatataggtgtatcttataaaaaagcgccaacttcacttgctgtttttgctcagagtaattctgatgtaacgtttgatctagatgggcttaataagagccatgatggcgtaaaactgaaaaaaggtgaaattggcgtgggaagtaataaaataagtctatctagtgaagatggttcgataaaggtgagataaaaagagaaaaacacaagacaacaattcccgctattgaagaatggttgtcttatttgtttgtatttaaaatgttttggaatatttatctccttttgtataaaaaataattataatgagattaattatctgtataatgattgaaataaacagtgaattaagaatatcagttttatatttaaggagcggaaagcttgggttacaaaatattaattgtagaagacgaccaattcataagcgatatggtaagcgaaagcttaacgaaagaagggtttgaagtaacagcagcttttgatggtgaagaagctttagacatattgaacacccaaaagtttgaggttatattgttggatttaatgcttccgaagatagatggtatggaatgtttaagaatgattcgttccaaaagtatggttcccgttcttatcatgtctgcaaaagatgaagatgtagataaggcacttggtctcggcctcggggctgatgattatatttctaaacctttttctatgctggaggtaatagccagaattaaagcaaccattagaagagaaagacactataagagctccctgtcttcaaaggaagaaaaaatcattaaaataggtgatttaagtgttgacctgcatggcttttctgttaaaaaattcaatgaaaagattaatctcacggcaaaagaatttaatattttaaaactctttatttctaatccttcacaagtatatactaagtctcaactttataaatccgtatgggaagatgagtatcatggagatgagaatgtaattaatgttcatattagacggcttagagagaaaattgaggacgatccatctcatccaatgtacataaaaacgttgtggggaatcggttataagttgggagatttttaaattgttttatatgttggttattttattcatatgctctgtagcagtaaatatatttctattccgaagccgattaaatctaaggactgagattaaatatataagaaataaacttcgaaatgttgttaatgaagagacaggcgaaagattattgcttaacacggaagataaatatataaaatccttgttaattcaaataaaccgtcttttagaccataatcaaaagatcaaagggaactgcaatagtattgaactgtccatgcgaaaaatgttatcaaatatttcacacgatttaaagacgcctttaacagttatactaggttatattgaaattataaataacgataaaagtctgacttcggaaaaggttatgagtttactaaaaacagttaatttaaaaacggtcgaggtattagcgttaataaaccgtttttttgaacttgtaaaattagagtcaggagataaaaaattaaattcttcacgaattgacatatgtgaagtcagccgaaaaataattttggattactacgaaattttaatcagcaaagaatttgaagtagtgattgatatacccgatgattctgtctttgttggcggagatgaagatgcaattgagagggttctgaataatttaattacgaatgcaattcaatatggttccgatggtaagatggtgggcttaaagatcagaataactgataatgatgtttttgtagaaatatcagataaaggaaaaggaataaatgaaatgcataaagaccgtgtctttgaacgaatgtacacattggaggactcgagaaataccaattatcagggaagcggattggggctgacgattactaagagattagtagagcaaatggaaggaagtatatctctaaatagtgtccccttcaaagaaacaacgttttctgtacgtttaagacgtattaaattttaataaaagcagtaaggtttcttctgtatacgtcttcaaatcccctttctctttaatctgagaggctgacaacagtctcttttttttatacgcaaaaggctggcatgaatcttgcatataaaaaggggcgtaacgacaatgtgaaagggattgatgggttttggtgtaaaagcgcttacattttgttctgccggtaattgaagcttacacgtaaaatacgatgaggtgataaaacatgtcagccaacccgctttctaaaagcaatcagaaagatgaagaaaaagaagttcttaatttgttcttgtcaacacaatcgatcataaaagaggccctgcgtaagctgggctatcctgacaatatgtatgaactgatgaaagagccgatgcggcttttaaccgtccgcatccccgtcaaaatggacaatggctcagtacaggttttcacgggctaccgctcacagcataatgacgcagtcggcccgacaaaagggggcgtgcggtttcatccggaagtcagtgaagaagaggtcaaggcgctttccatctggatgactttaaaatgcggcatcacaaatcttccttacgggggcggaaaaggcggcatcatctgtgatccgcggacgatgtcattcggagagctggaacggctgagccgcggatatgtgcgtgcgatcagccagatcgtcggtccgacaaaggatattccggctcccgacgtatataccaactcacagattatggcatggatgatggacgaatacagccgcctgagagaatttgattcaccgggattcattacgggcaaaccgatcgttctcggcggttcacaggggcgggagacagcgaccgcgcaaggcgtcacgatttgtattgaggaagccgttaagaaaaaagggattccattggaaaatgcgcggatcatcattcaggggttcggaaatgcggggagctttctcgctaaatttatgcatgacgccggcgccaaggtgatcggcatctcagacgcccacggcgctttgtatgaccctgacggccttgacattgattacctgctggataagcgggacagcttcggcacggtgacgaatctcttcacggatgtcataacgaaccgagagctgctggaaaaggagtgtgatattctcgtgcctgccgcaatctccaatcagattacggctgaaaacgcccatcacattaaagcttcaatcattgtggaggcggcgaacgggccgacaacgatagacgccacgaaaatcctgaatgaaagaggcgtgcttctcgtgccggatattttggcaagcgccggcggcgtgacggtgtcttattttgaatgggtgcaaaataatcaaggcttttactggtctgaggaggaagtcgccggaaaactgcgcagcgtcatggtgaattcgtttgaatccatttatcagacagcgcatacccacaaagtcgatatgcgtttggccgcctatatgacgggcatcagaaagtcggctgaagcggcccggttccgcggctgggtataagtgttatccgcaaagagattttgcatcagttatatagcagatcgcaaaatttctttgcgttttcagattacagctgacagattcggacaagcttcgtccgctttcggcaaagattttcttatttttatcacaaattgctatgctggtatgcttcttgcatcttcataaagcgtgagcacacattacaaaatacggggaggatttctaatgacagtttcatacgcacacgaaccatttacaaattttcaggaagagacaaataaacaatcgtttcaggaagcgctggcttatgtgaattcacagctcggcaagcattatccgcttatcatcaacggtgaagcgattgaaacggataaaaagatcatttccgtcaatccggcagataaaaaagaagtgatcggttctgtatcggccgccggaaaagaacttgcggaaaaggccatgcaggctgcgctgcaggcatttcaaacatggaaaaaagtacggccggaacaccgcgcgaatgtgctgtttaaagcggcggcgatcatccgcagaagaaagcacgaattctccgcttatctagtgaaagaagcgggaaaaccgtggaaggaagcggatgctgatacggcggaagcgatcgattttttagagtattatgcccgtcagatgctgaaactgaaagacggttcccctgtaaagagccgtgacggagaatataatcagtatcactatgagccgcttggggtgggaatcgtcatttctccattcaacttcccgcttgcgatcatggcgggaacggcggcagcagccatcgtaacaggcaacacgatactgctgaaaccggcggatgcggcgcctgtcgtggcggcgaaatttgttgaagtgatgaaagaagcgggcctgccggacggcgtgctccaattcataccgggcgacggaggagaaatcggcgactatctggttgagcatccaaagacgagatttgtgtcgtttacaggctcccgcgcggtcggatgccgcatctatgaacgcgccgcaaaagtacagccgggacaaaagtggctgaaacgggtcattgccgaaatgggggggaaagatacggtgcttgtagacagagatgctgatcttgatcttgccgcttcctcaatcgtgtattccgccttcggattctcaggccaaaaatgttcagccggttcccgtgcggtcattcatcaggacgtctatgatgaagttgttgaaaaagccgtcgctttaacaaaatcactcaccgtcggaagtccggaagattttgatacatacatggggccagtcatccacgaagcatcttataataaagtcatgagttatatcgaaatcggcaaaacagaaggaaaactcctgacgggaggcgaaggtgatgattcaaaaggatactttattcagccgaccatttttgcggatgttgatgaaaacgcccgcctgatgcaggaggaaattttcgggccggtcgtcgcgatctcaaaagcccgtgatttcgaccatatgcttgagattgccaataataccgattacggactgacgggcgctctgttatcgaaaacccgcgcgcacattgaacgcgcccgcgaagattttcacgtcgggaatctatacttcaaccgcggatgtacgggagcgattgtcggataccagccgttcggcggtttcaatatgtcaggaaccgattcaaaagccggaggacctgactatctgattcttcatatgcaggcaaaaacaacgtctgaagcctattaatctttcggaaatagcgcgatgaaaaagagagtcgcgctattttctctatatgagggtaaggaggatggaatatgtatcagcagctcagcaaaatgcttccggaggagaaaatagaagccattacgaaatcactggtggcgttaaacagcatcaacggcacattgggagaaggaaaaaaagccgactatatcaaagatatgatcaagagctttccctactttcaggagaatccgtcacatgtgtgggagcaggcgattcctgaggacccttacggccgcaaaaatattttcgcatttattgagggaaacggcgaaagcctgaatacggtcatttatcacgctcatcttgatacggtcggcatcgaggatttcggccctttaaaagatatcgcttttgattccgaccgtctcgcggagtatttctcaaactatgaatttgatcgggatgtgcagcgggacgcccgctcaggcgagtggatgttcggaaggggttcggttgatatgcagagcggtattgccgttcatctcgccaatctgcttcacttttctgaacggcgcgatcagctgccgggccatattctgttcatggcaaacccggatgaagaaagccagcattccggcattttaaccagcatttctgaattaaaacggctgaaacaagaaaagcatcttcgttatttagcagcgattaataacgattttatcacgccgctgtatgagggtgacacgacaaggtacatctacacgggcgcggcagggaagcttttgccttgctttgcgatttacgggcgggaggtgcatgtcggtgatacgctgtccggcatcgacccgaatttgatcgcatcagaaatcaccagaagaattcacaacaatattcatatggcggaaaacattgaaggggagcttgtgcttccgccgacctgcctgtaccagcgtgacaataaggaagcgtataacgtgcagaccgccgtcagcagctatgtctattttaattattttatttacgagaaaaccgccaaagaagtcatggatcagctgactgccgtggctgacgaagcttgcagagagacagagcgaaaattatctgattattatgacgaatactgcgagagaacgagcctgccgaaaaaagagatgtcatggaacgttcaagtgtacagtctggaagattacctgaaaaggctgagaaaccgcgggatagaccctgcacagtgtatcgagcagacatttaaaacatatgaacatcttgaactgcggatgagatgctttaaagccgtcgaggaactgcaaaaactcgatcctgagcagggagccaaggtcattattttctatgcgccgccttaccttccgcacaattatctgaaagaagagagcacacgggaccggcttttgcagcatgtcattcaagaagcggtcgataaaacagcggcatcaaccggagaaacattcgtctttaaaaagtttttcccttatttagcggacggaagctttttatcgctgcatgaaacagacgaggaggtctccgcctttaccgataattttccgggctgggatgtcatcgggacgattccttttaaagaaatcagggaattgaatattccgtcggtcaatataggggtatacggaaaagacggccataaatggacggaacgcgtgtacaagccgtacacattccatgtgctgccggaactcattcagcagacgacaatgcaccttttgcacagctaccgattagacatacgcacaaatggctgacataacggaataagggggatgtatatgcagggagataccaatcaaactgaattacagcgcacgatgaagggccggcatttgttcatgatcgccctcggcggcgtgatcgggacggggctttttctgggctccggttttacgatcagtgaagcgggaccgatcggcgcgatattggcttatgtgatcggcggatttttaatgtatctggtgatgctttgtttgggggagctcgcggtcgccatgccggtcgcaggatcatttcaggcgtatgccgcaaagtttctcgggccgtcgacggggtttacgatcggatggatgtacgcattcagctgggccaacacagtggggcttgaactgacatcggcggggattttaatgcagcggtggtttccggccgttccgatttgggtgtggtgccttgtattcggcgtcgtcattttttccattaacgcgctgtctgcgcggagttttgcggaaatggaattttggttttccagcattaaggtcatggccattgtattgtttattattctcggctgcgctgcggtattcggctttgtcggttttaacggcgggcagacggctccgtatctgtcaaactttacgacggacaatgggcttttcccgaacggcgcccaagccgtgctgtttacccttgtcatggtgaatttttcatttcagggtaccgagctggtcggaatcgcctcgggagaaagcgaaaatccggaaaagacgcttccccgctcaatccgaaacgtcatatggcggacgctgtttttcttcgtgctggcgatgtttgttctcgtgtccattttgccgtaccaaaccgcaggcgtcatcgaaagcccgtttgtggctgtgctggataaaatcggcgttccctatgcggctgatatcatgaactttgtcattctgaccgccatgctgtcggtggcgaattccgggctgtacgcttcgtccagaatgatgtggtccctatcaaaaactaagatgggtcccgcttccttaacgaaactgacgaaaaaaggcgtgcctctgaaagctctttccatcaccatcgccatctccggtttatccctgctgacaagtgtattcgcggctgaaacggtgtatgtgtggctcatttccatctccggtatgattaccgtcgtcgcgtggatgtcaatctgcgcttcacaattcgttttccggaggcgctttctcgctgaaggaggaaatctgaaagacctggcatttaaaacgcctttttatccgatcgtgccgattctcggattttcggtttacgggcttatcttgatcagtctcatctttatccccgaccagcgtatcggtctgtactgcggcgtcccgctgatgatcatctgttacgcgtattatcacttcggtatcaaaaaacgcctgaagcgtgaggcggcttcttcggaaaaaggcgctgccggataagaaaaaaagccctccgcaaaaagcggcgggctttactttgtttttcgtttggccgacagcacataggatagaacggcacagaactgaaaaccgaaaatgctgacggccatcggccaggcattttcttctccggcaataccgacaaggggagcggcagccgcaccgccgataaagggcaggagtccgagaagagccgcagcgcttcccgcgcctttctcctgtttctgcatagccagagaaaaccccgtcgtcgtgacgatcccgaccgaagaaacaatgatgaataaagaaatgcagaccgccgtcagtcctaaaccaaacgcaagtgataaaagcaaagcgatgcttccgatgacggcgatcaacagcccggagacaaacagcttccgttcatcatgtgttttagccatccgtccggtgatttgggtggcgcatatgattcccgcaccgtttacggcgaacagcaggctgaacatttgggccgatacgccgtagatgttttgcagtacaaacggcgacccggcaatatatgcgaacatgccggtcatcacaaatgcctggctgagcgcaaatcccataaacatccggtcgccaagcaggccgcgaaacgtcatcagcgtctcccggagtccgccgcttgtccgcttttccggcgggagtgattcaggcaacgccgtaagcacggcggcggaaatgatacagccgatcaccgccagcacgacaaatacgattttccagccggcaaactgaaggataaatccccctgtaatcggcgctaaaatcggcgccgccccattgacgagcatcagtaatgagaaaaaagccgttaattcttttccggaatatatatcgcgcgcggaagcccgtgcgatgacgattccggccgccccggtaaatccttgaataaacctcataacaattaaaaacgaaacagaagggctgaaggcgcataataaagaagacagcgtataaagcagcaatgacagaatgagcggcttccagcgcccgatcatatcactgagcggcccgacaacgatctgcccgaccgccagccccaaaagacaaaacgtcaggctcagctgtgcaagtgacgctgtcgtatgaagatcggccgccacttcaggcaaagcgggcagatacatatcgagcgaaagcggcccgaatgaagcgagcgtcccgagaatcagtaccatgccgaggcctgcgcgggcggcctttgaatcagcgttattcattccatgacccccaccttaacaaatgattctatcactatagcataaccggacggcgtattttatatcatttattgaatacaaactaaatattttatttaaaatctgaatgtaaataaaaaaatggaattagttttcatgtgaaatgtaaaatgaaatataaggatgctaaactataaaacaacaaaaggtagaaaagttttacggaagaggtgttcaaagagcatgaacagcaaacaaaccgatcacatcgaaacgaaacgccgatttccgatctgtctcgcgcttgctttgacattaggcgtatttgccgccggttctgaagagctggtgatttctccgctgcttccggatttagcgcgggctttcagctcggatgtcagtgtgctggcgctttccatcagtatttacggattgatgatttttattggcgcgccgcttctcgttccgctgggagataaatattcccgggagctcagcctgatggcggggctgcttatatttacggccggcacggtgatctgcgcgctggcgcacaatctctttttcttctttctgggcagggcgctttccgggcttgcggcgggtgcgtttgtgccgacagtttatgcggtggtcggcgaccgtgtgccttatgcgtaccgcggcaaggtgatgggtctgatcgtgtcaagctggtcgctcgctttgattttcggcgttccgattggctcttttatcggcggcgttttgaattggcggtggacgttttggattttcgctctcatgtctgtcctcgttgcttcgctcattttcattgaggcgcgccgcagcacggcggatggggataaaacagaagaggaaaccggacggcaggcaggcactttccgggatgcgctgaaggtgccccgtgtccctgtatacctcacgatcactttttgcaatatgatcggtttttacggcatgtattcatttctcggcacctatcttcaccgcgtgctgccggggggaaatacagcttcagggctgctgatcatggtgtacggaatcggtttttccatgagcgtgttcaccggaaaaatcgcagataaggcggggaaaatgcgctctttgatcgcggcattggccgtgatcagcatatggctttcctgtctcgcctatgcgccgtcatcaatgccgtttttggtcatcgggttattcgtctggggattgatgcaaagcctgacggtgaccttgctcagcaccattttaagtgattgctcacagagccgccggggcaaaatcatggcattttacagtctggcgtccaatttggccgtcaccttgggttctgctgtcatgggtccggtctatgtcggatacggatatgcagctgtcggatttatttgtgcggccgtcaccctcatcggctttgtcctcagcgttttcgcatacagaaggtatgggaaatatgagcatcaggtcgaccaatcattgtatcggtaaaataaagtttctataattttataaatgttaatttttaacaccttatatcttaaggtgttttctaatatataggaataattatcaatattttcaaataatattgacaccttgaacatctatggataatatttacttaaaatttaacagattggttggtgctcatgattatattggataatagcattcaaacaaaaagcaaggcttattcaatatctaaactgattacgatcaacacgctcggtcctgaagggacaagcagtgagtacgcagcaaaaaactttatcaccaattttacccttctccaaggggtgaacagcaaattatcactgcatgatacatttgaatcgtgcattgaaaaaacgcttcaaagtccgctggaatacacaattgtgcctcacgcgtatgacggcattaagcacttctacatgagaccggatctgcagcttctgcaaattttcaggtgcgacaccccgatgtacggcctggctgtccggcccggttttgaatatacagatgacatgcttgaacaggctgtcatcgtatcccacccgtctcctatcaatttgattaagtattttacccgtaaagatgtcacgtttgatctggtgaactcgacgagcgcagccgcgaaaagagtgaaggacggtttgtccgacatcgcgctgacaaatgagctggccagacaaaagtacggccttcactttgtcaaaacatttaaaagcattcccatgagctggtcattattcggaaaaggagagattcatgatgaaaactgaacaagatttgcaggaactttatttcccgacgcctaaattaatagaatgggataacggagtaagacaatattcgtctgtcagaggagatacggaagttctgctttcttacgttccgccgcatacaaacgtggaaccgcatcagcataaggaagttcaaatcggccttgtcgtttccggcgagctgtccatgactgtcggagatgtcacaagaaagatgacagcgctggaatcagcctatatcgcgcctcctaacgtgcctcacggcgcaagaaatgagacggatcaagaagtgatcgccattgatatcaaacgcctgaaagccggtgaaacctacacaagccccgaggaccattttttgaatatttttaaaacgagagacttattgcctgggatggaagtcacgttcttcgtggaagactgggtggaaatcatgcttgccaacattccgggcaacgggggagaaatgccgttccataaacaccgcaatgaacagatcggcatctgcatcggcggcggctatgatatgaccattgaaggctgcaaagtggatatgacattcggcacagcttatttctgcgatccgagagaagatcacggcgccatcaacagatttgaaaaagattcaaaatcagtcaatatctttttccctccgcgctataacagagcaaaagcgaaaaaattagaggcgaaagagtcatgaacctgacggataaaaccgtcctcatcacagggggcgcatcaggcatcggttatgccgcggttcaggcgtttctgaatcagcaggcgaatgtggtcgtcgcggatattgatgaggcgcagggagaagcgatgatccggaaagaaaacaatgacaggctgcattttgtccggacggatattacagatgaaccggcatgtcaaaacgccatccggtcagcggcggacaagttcggcggattggacgtgttaatcaataacgccggcatcgaaattgtcgccccgattcatgagatggagctgagcgattggaacaaggtgctcaacgtcaatctgacgggcatgtttcttatgagcaagcacgcgctcaagtatatgctcaaaagcggtaagggcaatatcattaacacgtgctccgtcggaggagtcgttgcatggcccgacattcccgcatataacgcctctaaaggcggcgtattgcagctgacgcgttcgatggccgtcgattacgccaaatacaacatccgcgtcaattgcgtgtgcccgggaatcattgacacacctttgaatgaaaagtcgttccttgaaaacaacgaaggcacgcttgaagaaatcaaaaaagaaaaagcgaaagtcaatccgctgctgagactcggcaagcctgaagaaatagcgaacgtcatgctgtttctcgcgtcggatttatcaagctatatgaccggaagcgcgatcaccgcagacggtggatacaccgcacaatagagaaggagtgtttacatatggagagaaaaacagtattggttatcgctgaccttgggggatgcccgccgcatatgttttacaaaagcgcagccgaaaaatacaacctcgtcagctttattccgagaccttttgcaattacagcctctcatgcagctttgattgaaaaatactcggttgcggtcattaaagataaagactattttaagagtctggctgattttgagcatcccgattcgatttactgggctcatgaagatcatgataaacctgaggaagaagtcgtcgaagaaatcgtcaaggtggccggcatgttcgcggttgacgccattacgaccaacaatgaactgtttatcgctccgatggcaaaagcgtgtgaacgtctcggcctgcggggagcgggcgtacaggccgctgaaaatgccagagataaaaacaaaatgagagccgccttcaaccgggccggcgtcaagtctatcaaaaacaaacgggtgacgacgctggaagatttccgcgccgcgcttcaggaaattggaacgccgctcattctgaagcctacatatctggcgagctccatcggcgtgactcttatcaaagagatggaaacggccgaaaccgaatttaacagagtcaatgaatacctgaagtcgatcaacgtaccgaaagcggtcacgtttgaagcgccgtttatcgcggaagaatttttgcagggcgagtatgacgactggtacgaaacaagcggttattccgactatatcagcatagaaggcatcatggccgacggggaatacttccccgtcgcgattcatgataaaacaccgcaaatcggattcacggagacatcgcatattacgccgtccatcctggatgatgacgcgaagcggaaaatcgtcgaagcagccaaaaaggcgaatgaaggactcggcctcgaaaactgcgcaacacatacagagattaaattaatgaaaaaccgggaagccggactgattgaatcagcggcacgatttgcgggctggaacatgattccgaatattaaaaaggtcttcggcgtcgatatggcgcagctgttattggatgttctctgtttcggaaaagaagccgatctgccgaaaggattattggagcaggagccatgctatgtcgccgactgccacttgtatcctcagcatttcaaagagaacggccagctgcctgagacggctgtcgatttcatcattgaaagcattgacattcccgacggcgtcttaaagggagacaccgaaatcgtttctttctcagcggccgaagcgggtacatccgtggatctgcggctgttcgaagcgttcaacagcattgcggcgtttgagctgaaaggaagcaattcgggtgacgtggccgaatcaatcaaacaaattcagcagcaggcgaagctgactgcaaagtatgcgttaccggtatgaaacagctgaaaccgaactctaagtatttgcttttcgggcaggcgctttcgtttatgggagactattgcgttctcccggccctgctcattttgtctacatactatcacgactactgggtgacgtccggcgtcatcgcggtccgcagtattccgatggtgtttcagccgtttttaggcgtgctcgtggaccggctcgacagggtgaaaatcatgctgtggacggatgtgatcagaggtgtcatctttttggggctgacatttctcccgaaaggcgaatatccgctgctttttctggcgctgctgtttgtttcttatggaagcggcgtgttttttaacccggcacgtctcgcggtcatgtcgtctttagaagcggatattaaaaatatcaacactttgtttgcaaaagccacgacgatttcgattattgtcggcgctgcagccggcggactttttctgttgggcggttctgtggagcttgccgtcgcgtttaacggggtgacctatcttgtctccgcgtttttcatcagccgcattaagcttcaatacgtgccgattcagtcagaaaacgtgagagaagcttttcagtcgtttaaagaaggcctgaaggaaatcaaaacaaatgcttttgtgttaaacgccatgttcacgatgattacgatggcgcttttgtggggtgtcgtctacagctatttcccgattgtcagccgctttttaggcgacggggaaatcggcaatttcatcctgacgttctgcatcggcttcggcggctttatcggcgccgctcttgtcagcaaatggggctttaacaacaataaagggctgatgtattttacagtgttatcgatcgtctcgcttgcgctgtttttgtttaccccgattttcgccgtgtcagtcattgccgccattcttttctttatcgcaatggaatacggtgaagtgctggcgaaggtcaaagttcaggagaacgcggcgaaccagattcagggccggattttttcggtggcggaggcgtccatcggattgtgcatcgccgtcggttccatgctgatcaacattgtagacgcggcagtcatcatggcgtttatcgtccttttggtcagcgggctgtttctgcatacaaaactggtcaataaatccttttcagaacggaataacgaatcagagcaaattcatttataaggagcctttcagatggaaatcataccgtccgacgtcatcaagacacttccgaaacaggaattttcgctcgtttttcaaaaggtaaaagagatggagaaaacgggagcccagatcattaacctcgggcaggggaatcccgatctccccacaccgccgcatatcgttgaaacattgcgggaggctgcgctgaatccttcgtatcacggatacggcccgttcagaggctatccgtttctgaaagaagccatcgcggaattttatgagagagagtacggggtatcggtcaatccggagacagaagtcgcgctgttcggcggagggaaagctggtttgtacgttttgacgcaatgcctgctgaaccccggcgatatcgccttagtcccgaaccccggctaccctgagtatttatcgggcattacaatggccagagcggagctgcatgagatgccgcttcatccggaaaacggctatttgccggattttgagcggattgatcccgccgtcctgaaaaaagccaagctgatgtttttgaattacccgaataacccgacgggcgcgactgcggatcaggcgttttatgaaaaagcggcagcgtttgcaaaaaaacatgacatccaccttattcacgattttgcatacggcgcgttcgaatttgatcagaacccggccagctttcttcaggcgaaagaagcgaaaacggtcggcgcggagctttattcattttcgaaaaccttcaatatggcaggctggagaatggcatttgccgtggggaatgaaaaaatcattcaggcggtcaatgagtttcaggatcacgtcttcgtcggcatgttcggcggtcttcagcaggcggcagcggcggcgctgtcaggaaatcctgagcataccgagcgtctgaagcgcacatataaagaacggattgactttttcacggcgttatgtgaaaaggaattaggctggagcattgaaaaaccgaaagggactttttatgtctgggctgaaattccgaatgaattcgagtcttcacaccagttttcggactatctgctggagcatgcccatgttgtcgtgacgcccggcgagattttcggcagcggcggaaagcgttatgtcagaatatcaatggtggccaagcagggcgatttgagggaattcgtggtgcggattcaaaagctcggtttgtcctttccttcattacaagaaacatcccgctgagagcgggatgtttttattatatgcttttcatgctgccgccgtcggctgacacttgctgtccggtaatataggaagcttcttcagaggcaagaaaggcagccagcgccgcggtttcttccggagttccgacacgcttcatcgggacgcctgaggcaatccgttcttctgcttccgctttagaaatgccgttttgcttcatgacattcttcacgaattggtgataacggtctgtggcgataaacccgggattcagacagttgacagtaatgtgaaaaggcgcaagctgaatggcgatgtttttgctggcattaattaaagcggcgttcatcatgctgttggtaaacatattggcgccgggttctttccataggtttccgacgatattaatgattctgccgaattcgtgctgtttcatgattgctgcggccgttttcatagagtcgatataggcgatcgttttattcgtaaaggtatttgtcatatcctctatatcacagttttcaaaggtatccggcgagccgcccggaatgttgttgatcaatacatcaagccgtccgcattgtgatctgatctcttcaaaaatgccggctcttgtcttctggtccgacatatccccggccagaacggtgacgcccgcatccggatgtttggcgaggatctcttcttttaccgattcgatattttcgggaactcgtgaattaatgacggtatgatagccattgtccgccagtttcagagcgatcgctttgccgatcccttgactggctcccataataaacgcggttcgttttgacaactgtctgcacccctttaccaaaatggaatctcctttacatcgtaaaaaaaaatgataaaaatagcaaattttatttaaattctgacaaagaaaaaacccgccggacaggcgggtggatgttacacgtgcaaaaacttcggaagcgtgtcgagggacaagcggtttccgacaaaaaatgaaccgaattcgccgtagcgcgcgctgacttcatcaaagcgcatttcgtaaacaagttttttgaactgaagcacatcatcgctgaagagcgtgacgccccattcgtaatcgtcaaaaccgacagatcccgtgataatctgtttgactttgccggcatagctccgtccgatcaagccgtggcttctcatcaggtttctgcgttcatccatagaaagcatgtaccagttgtcattgccgcttcttcttttatccatcggatagaagcagacgtatttcgcttcaggcagctcagggtacaggcgggcgcggacatgcggattttcatacggatcgccttctccgcttgcgaggtagttgctcagctcaaccacggacacgtaagaataagccgggattgtaaattcagcaagctttgatttgttaaattcaagctcgatttcgttcagctcttccattgtcgggcgaagaatcatcagcatgaaatcagctttctgtccgacgatgctgtagatggtttgcgagcctttgccttctttttgggcgacgccccatttttcaagcagtcccgtaaattcgtgaataatcgacaggcgctcatcgctggataacatcttccatgacgtccagtccattgtgcggaaatcgtgaagcgcgtaccagccgtcaagcgtttgggcggcttcgttcgttttttgctgctcactcatgtatcttcactcctatatcttttcattgatgccttcactatatcacagtttaaccgtttcggctgtggagaaaccttgaataatccgaagccttgtttcagaaactaagccgtgaaacaaaccgtcaattaaattagttagaaaaataagatttctttttgaaagcgctataatggaagttggttatttgaatttagctggaagaagagtatgctgtaaaagtaagcgttttttgtcaacatagaggagggtatatcgtggcagatttatttacaaaagtacaagaaaaagtcgcaggaaaagatgtgaaaatcgtatttcctgaagggttggacgaacgtatcctggttgcggtcaacaacttggcgggcaacaaggtattaaagccgatcgtagtcggcaataaagaagacattcaagcaaaagcgaaagaattaaatcttacgcttgacggcgtggacatttttgacccgcatacatatgaaggcatggaagaactcgttcaggctttcgtagaacgccgcaaaggcaaagcgacggaagaacaggcccgcaaggctttgctggacgaaaactatttcggcacgatgcttgtgtacaaaggtctcgcagacggacttgtcagcggagctgcacattctactgctgatacggtgcgccctgcacttcaaatcattaaaacaaaagaaggcgtgaaaaaaacatcaggcgtcttcatcatggcccgcggtgacgagcagtatgtgttcgctgattgcgcgatcaacattgctcctgacagccaggaccttgccgaaatcgccattgaaagcgccaatacggctcaaatgtttgacattgacccgcgcgttgccatgctcagcttctctacaaaaggatcggcgaaatcagacgagacggacaaagtggctgaagcggtgaaaattgcgaaggaaaaagcgcctgagcttacgcttgacggcgaattccaattcgacgctgcatttgtgccgtctgtcgcggagaaaaaagcgccggactccgacattaaaggagacgcgaatgtatttgtattcccaagccttgaagcaggaaacatcggctataaaatcgctcagcgcttaggcggctttgaagcggtcggaccgattctgcaaggattgaatatgcctgtaaacgatctttccagaggatgtaatgcggaagacgtctacaatcttgcgttaattacggctgctcaagcgctgtaatccgcaaatgccggcctttatgagggccggcatttttttatagaaagaacgtcactgcggcccagccgaacagggacaaacagagagaaccgatcaagcctgctgcgagcgcccgccagccgttatgacgaaacgccgatatatggactttcaaaccgagacccgccatcgccatgccgattaaaacataagacacttgaacaagaaacgcggaaaacgaggctgaaataacgcctgatgtatggatggcgctcattccgagaaatccgaagataaaccaagggatggggagcgaagcggcagaagccgtctctgactttccgctgcggcgcgcccgcattccgagcatgaatgcggccgggacgagcagcgcgacccgggtcagtttgacgatcaccgccatctcgacggctgcttttcctccggcgctgccggccgccgccgcatgcgccacctcgtgaagcgttgccccgcaaaaggctccgtaagccgcaggagaaaagcctaatccatgataagcaagagaatatacaacagtaaaaacggttcctaataacgaaacggcggccgcgctgatggcggctgcattttcatttgatctgatctgcggcgcgatcgcggcaatggcagccgctccgcagatcgctgtgccgcaggctgtcagcgtgctgagtgtctgatctatacggaacagccgggacagtccatatacaacggcacccgcaaacatcatacagcagacggcaattgcaaatacgtgccagcccgcatgatagatatccgccagattcagtctcataccaagcaggatgatgcctgctttcagcaagtatttgcttgagaacgcgatccccggctctaatgccgcccgctgtccgaatacggcacgccagagcatgccgatcagcattgcaaggacaagcattccgaacatatgcaaaaacggcaggcggctgacatagaaagccgcaaacgcaattcctgcggtaactgaaacaccttttaccatcttcatctcagtcacttcccattatcttgataactccactttactgcggtcttaatcattagtaaaatatatttatatgatctaaatgattaggaaaaataatgattaggggcgatgctttttgtattatggtgaactgaaaacattcattgccgtcgtggaagaaaaaaactttacaaaggcggcgcagaagctgatgatttctcagccgagcgtcagcctccacatcaaaaacctggagaaagaatttcaaaccgctttgctgaaccgctctccgaagcactttacgactacgccgacgggggacattctctatcagcgcgccaagcagatggtctttttgtacgaacaggcgaaatccgaaatttacgcccatcatcattatgtcaaagggaagctcaaaatcgccgcgagctttaccatcggcgaatatattctgccgccgcttctcgcaaagcttcataacgagtatcccgagctgaacctggacgtcatgatcggaaacacggaggaggtcagcgaagcggttcggatgcttcaagccgatatcggattaattgaagggcatacggggaaaaacgagctcgacattcagccgtttatggaggatgaattgtgcattgccgcaccgaacggacacccgctcgccggcagaaaaaacatcccggctgccgaattgcaaaatcaagcgtgggtgacgagggagaagggttcgggaacgagggaatatttagaccacgtccttcaatcaaacggacttcggccgaaatccatgatgacgatcagcagcaaccagggcgtcaaagaagccgtgatcagcggaatgggtctttccgttctgtcaaaaagcgtgctgcaaaaggatctgcttcacggcagcatttccgtgcttgaggtaaaaggattctccttaaaacggaaactgtctatcatccaatcttccattatggagaacacaaaaaacaaagaaatcttcatcgctcttttgaaaagccaatttcaatcatctcaagcggagtgatataataaatgcatggaaagcttatgacgaaagggatttaatatagatgggaaagcaaccgattgatttactgatgcagccgagctggagaatcattgaccaatccagcctcggcccttattttgatgcgaagcagtcattcgcaatggatgatacgctgtgcgcctccgtaggcaaaggggaatcgcctgcgacggcacgctcttgggtgcaccaccggacgatcgtgctcggcattcaggacacgcgcctgccgtttttagaggacggcgtgaaattgctggaggacgaaggctaccgtgttattgtccgcaattccggaggcctcgccgtcgtactggacgaaggcgtattgaatatctcgcttatttttgaagacgagaaaaaaggcatcgacatcgacagaggctacgaggcgatgacagagctggtgcggcggatgctgcgtccgcacaatgccgaaattgaagcatatgaaattaaaggatcgtactgtccgggcagctacgatctcagcatcggcggccgaaaattcgcgggaatctcacaaagacgcctgcggggcggaaccgcggttcagatttacctctgcgccgataaaagcggaagcgaacgcgccgatctgatcagacgtttctatcaagccgctttaaaagacaaaagcaacgatacaaaaggcgtatatcccgatatccggcccgaaacgatggcttcattaagcgaattgctgcaaacggacattaccgtgcaggacttaatgctggcgcttttgaccgaactgaaggaactcagcggccgcctgtatgcagccggattatcgccggaagaagaaatggtatttgaaaaaaatctgacccgaatgctggaacggaatgagaaggtgttcggcacgcaggaaagcttggactaagtccgggctttttttgttttttctggtaattatatactatttagttatagtgaaaaaagaagtgttatatgaaaactaatttacattatataccttatttgattaatatatttatgtaggttccaaataattctataaactgaaggagatggagatatgaactttaaaaaaataagagaagaaaaaagaatcacgatcccgacacatttgttagccggagatgcggaacaatcaggcaattctttcgcttggagcggctgggtgcttgtagtgccgagccaagaagacaatcaaaacccgaatttgaatttctctgatttagccgctcaaaagtaggataatcactgtttggagcctacacatctgagacgaggcggtgagagtttgacacaagagtatataacagaaattaagcggggagcactgtcatggattgttaaaaatatccattatttcgatatgaatcataaagtagcaaatgatttcaggtggcgccttaaaacatttatagaactcatttttcttaccaattacctgatcagaaatcaggcagatgataaggaagttgctgttttaacggagtttattacagaaaggctccataatgatcagcttgaagaatttattcattttgatccggacggtctcgccggattggctattgcgggtgaatttcttaccttgactgatcatccgtcacgggcttcggtgatatgggagctggaaaaattcacggcagcgcgttttgattgcagccttgctaaaattccctttcggaaaatggatctgaagtacagtctgcaaagagcaggcgtaacctcggaaataacggatttttctgacttatatcactacacagcagctggtcaggatatcccaaatacatatatgacggatcatgatgcgtacagtatcactcatacgattttttatataacagacatgggatgttcttcgcttacggataaagagtatcatctgccgtccttaaaagaaaaggtcctgaaatttctcgggatctatatctgtcttgagaatttagatattactagtgaattattgatgtgcagctcttttttacatatcgacatggataaggacaaccataaatcgctctatgaagcagcctggaataaaatctatcagggccgaatgaaagaggggaatgtcccgagcgtcacctatcaacataaacccggtttgaaaggtgaacagcgaagagaagatgtgtttaaacattgctatcatacaacacttgtcgccgcgggtgccgcgcatgcctgtcttagagcggaaaggaacgattaacttgaatagattagctgaggagacagatcaatttttattatcttttgctgaacaatcgcttccggatcaaaagagcattcagctgtttgccggcttctgcaagtactacaggaagacgagccattcttccgctgtaaaagaacatactgaaaggattgcctccgctttcgttgataagtcatgctgggaagatctgtttcactgtaacacggccattgtcaatgagttgattcatatctatttaacggcaaaagcttataaaaagaagcagggaatggattcggatgatcaggtcatacgtcacggattgcaaaacggctatcttataaaaaaagaatggccttattataaatacgccgaattcgtcggtttgctgaacgagctgggaatgtcaactgaccatgaaaaagtgcgcttttacaagaattcgatgtttcagcctttgctccatgacgcatggaaaagaacagctgaaaacgagctggagtttgtcgagtactgtcttcttcatttagatcagggagagcatctgcttcatcccggcttgaaggcttccattcaaaaatggcttgtgttttgtctcggcagccgaaaaatgaaacagctgtgcaatatgttatttatccaatcgtgtatcgatccatttttttatggctgtcaagcggctcttcatcatataaataacgagaatccatccattcattgtgctccggctcttctgccggcgattgagattctgaatctggagtgtggaacatgcagatagtaaaggaacattttaatataaaaaaaacagaagaatggctgctgggtttttggaagaaccttcagctgcagccggaagaaatagaagcagatgatctcatgcacctgttttgcggtttagcggcatgtcatcactttgaaaaaagaaaggatacagaagaaatcattctattcttagaccgttattttggagaaaaaacgcacgaatgccatccggtcctgttcgcgtatgcgtatcatgtgtaccgcaggatagatgccgcaaaaagcatcttttttcataacggacttgaacaaatggtccgcggtttacaagaggaactgaaatcagagccttcctctatgatcctcatggtattaggggcttattttggggcggtgactccggaagaactgatcgtgttcttagaaaccgggatgaaacgtgaggccgatttgctcatggcaccgggcggcattcaggaagaacaggcggatgccctttatgccgtcacttatttgcaaatgaaagaattgcagccttttctcacggaatggtacaaaacatcagactttgctttttcaggtttaatgttagccgagtgcagaaagtatcacattgacgccgttgcaaaatacacagccattatgaaatttctccaattcgatgaggcgctttttatacgggaagggcgggaatttctacgctttcagcagcgaagcagcgggagcttcggttatttgaatccattagcgatggaccaaggggcggtcagcggcaaattgctggaacttcaatatttcctgccgtccgctcattatgccgccgcctctctgtctatgctgtaatgtctctcttttgaaagacggaaaaagaaatcaataaacaaataagaaagtagatcgctataaccgtcatggaataggggatgtttaacgttgaaatcgcatcacccgcgcttttatttacataagcaacgagatttaaatgcggaaagagcgtaaatttataccatgtaaattgggcaagcaaatcagttccgcccaatatactgccggcaaacagcagtaaaatggataagcaaagggagagcgcctggcttttgcacaatactgacaaagtgaacgcaatggtgacaatgcttataatcgatatgaaacgcaaaagcagaatgattccggatgctttgattgaactgatggtatacagactgtcatttaaatgagtatagacgagcggatatgaagcattggaaaaaccgaataacacgccgccgatcagcaaacagctcacacagtaaaataagtaaaccatgccggtaaacagaagagacgccagaaatttcgatgttaaaacccgccatcttcggttcgggcttgtagcgataaacttaatcgtcccaagggcaaactctttagaaacaaccccgctgacggttaaaatcgcggtcaagctgacgaaaatctcaagcccgtttgaagtaaccgtgccgaaaaacctccagccgttccattcataagggttgatgttatgctccaaataatagtctttattcttaacatcagcagaataataaacgcctgtcgtttcagccggtttatcaatttcttcctgttttttttcggcgagaagccgttctttccaattgttatccgaggaagcatctaactcatgattcataataaggccggccagcaaaacgatgagaaacaggaaaaaaagagataaaagtgtgcctttttttcgggttatttttatgaattcgttctgtgccagatgaaatatgctcataccgcgtcctcctgatctgtaatcatcatgtatttctcttccaatgacaaagttcttgcagaaacgcgggaaatcagaatctctttctctgccaaagatttaatgacatacgggatggtatcttcgtccgcttccaattcaatgatgcggctgtctttttgctgtacttgaagaataccttcctgctctaatatttctttcgcccttgccggatgatcgaccgtgacggtaaacagctttttctgaccaaggtcatgtctgttcttcatgtcttcaattcctaaaatccgtccctttttaatataggcaaccctatcgcaaatttcctccatttccgacaataaatggcttgataataaaatagaaaccccttgcttcgctaaatcggaaagaatggtgcgcaattctttcattcctttaggatcgaggccgttcatcggttcatccagaattaataatccgggattgtgaagaagagaataagcgagccccaagcgctgtttcatgcctaatgagaaatgtttcacttttttgcgggcagcctgctccaatccgacttttgcaagggtattcataagctcatccgttcgcagcgagctgctgcgcagtttagtaaaatattttaggttttgcaaagcggtcatattcggatacatatccgggccttcaatgataaccccgatatgtctcataaaatattcaaagtcgctgtccggtctgcctctgaatgaaatggctccttctgtttttttaataagctgtacgatcattctgaaaatagtggtttttcctgagccgttcggccctaaaaggccgaatatctcaccttttctcacatcgaaagaaattgactgtacaataggggtatgattgattgttttagagacatcttttaatatcagggctggttcagtcatgatatttgcacaccttccttatgatttagggtaaaagccgtcaaaaccgaagaacatgcttccgatcaggccggcaacgattaaaatgagagcaatgctataccacatttttcgattcaatggtttccctccttacaacgctgacattccatttgaaatagcgcaaaaagatgcggaatatcagtttcgaaagatcaaatccggccataaacaccgccatacccgctccaagaaccatacatccgttaaaaatggctgttacaatcggcacttttacaaggagaaagaatgatccggtcatcagcatcaggccgatcgccatcaaacttaacaccgcaacagaggcaaaaagaaacggtgtcagcataaacatgaagttgaacatgcccatccccagcatcaggccgaatgctttgaaaaacgagcgccatgttttctgctcctcggcatcactgatgaaaatatccgcttttaaggcacgcgcaagtgttttggggtttcctaaattgcccgcgatttgttcatcgctttttccttcagcgccgcccatttggaatatttcgccgatatcggccagtatctctttttgctcacgttccggcagatcttttatttcccgccggagatgttttaaatattggtctttacacattcattttccctccttaatgatgctgttcactttttcagacaggtcaagccattccgattttaatgtttgatgataaaaggcgccttcttctgttactttgtaatatttgcgtgatgggccttgatcggaagctgctgtatacgtttttaggtagttattttttgtgagtcttcgtaatatggggtagatggtgccctccgatacagggaacgtttcacttatgatcttgattaattcataaccatataaatcttcataaagaagcagggacaacacacaaagttccaacgctccttttcgtaattggctactcatttactatcattcccatcatatctaataattgtattctctatacagtgtattgcacagtagctaatcgatcaataattcccaagaaccatttgggatgaggaattgaatctttatgcttatgtgcgggcggggaccgagatgcgcagcccttgcgggaagaaggcctcctgaacaatgtttacattaatatagatcaggattcgcgtcattgacaaatggcaaaaacccctttttccatgacaaggaaaggggtttttccgttattcggccattttttctaaattgccgttccggtccattttaaaggacggagaggcatgttcgtcgtcttcaaataaaactagttttctggctctgttcataattttcaccaaggtttcgtagtcttcctgaatggttttttgatctttttcaagcttttcgacggccgcttccagctgctcggttttagactgaagttcttgattttcccgttttaaacggtcattttccatttgcagggcggaagtttgctttccgctgccttcatagctctgcagaaattgaatgacatctgccattgtgagctccgccttttggctcggctgctgaggcgccagcaaatgtgataaactagctaactcttccttgaagctttcatcgacataaggcatatgttcgccggacatgacggcttgccgatcctcttttggcgcttccgtttgaaccgtctcttcggctgcggtttcctgcatgatatccgcatccggtgcaggcggctgatataatagtttcttcttggccggctggccgtttccgagcgcgcgcatccgctgtttccgctgttttttggcgagctgaagcgctttttcgtattgatggcggacgacggcattccatctgaaaccgcacgctgccgatgttctgtttaatttatcgcctacctcttcaaaggcgttcagctgcgtgcttccttcccgaacgtgacggagcacggtttccgcaagcagcaggtcgttttcctccgaccaggcgtcctgtctttgttttgtcaatgttctcaacccccaatatctttgatggtattagaatgtccagattggaaaatatttatacaaattggctgaaagaatgagagatacgcagagccttgcaggataatatgaatccttgtacaatgagatgtgatgtgatttttttcttttttaaaattaagatttaacatagaggaacattgaatgaagggaagcgtacatcatggctaatgaattccgagtgtgtgatgattgccaggccaccaatattaagactttgctgccgcgtttgaaagaagctgacccggatgcaaaagtggaggtcggatgtcagtcatattgcgggcccggacgcaaaaaatcgtttgctttcgtaaacaaccgcccgctgtcggcgccgactgaggacgagctgattgagaaagtgaaaaagaagatcaaaaagtaaatgtgtatttttacgacagcctcgcccgatgggtcaggcttttttgcttcaaaaaatcaatgtcggaaaactggaacaaaacgccggacaaattcaaggatgttttcaaattacagagccgatataatagaatcacggctaaaaaaaagagggaatgacgatggcgtatccaaacggaaaattatcagaagaaaaagtgtttaaagatcccgttcaccgctatgttcatgtgcgggacaagctgatctgggatttgatcggcacccgtgaatttcagcggctgcgccggatcaaacagctcggtacgacgtatttgacgtttcacggcgcggaacacagccgttttaaccattctctcggcgtctatgagattgtcagacgaatggttgatgatgtttttaaagggcgtcctgaatgggatgacaatgaacgcgaactctgtctcagcgctgcgcttttgcacgatttgggacatgggccgttttcacattcctttgaaaaggtttttcatctggatcatgaagactttacgagggaaatcatcctcggcgatactgaggtgaatcaggttctcagaaaggcggggccgggattcccgcaggatgttgccgaagtcattgccaaaacatacaaaaacaagcaggtggtcagcctgatttcgagtcagattgacgccgaccggatggattaccttcagcgggacgcgtactatacgggcgtcagctacggacattttgatatggaacggattttaagggtgatgcgtccgcgtgaggaccagatcgtcattaagcaaagcggcatgcacgccgtcgaagactatattatgagccgctatcaaatgtactggcaggtgtattttcatcccgtgacgagaagcgctgaagtcattttgacgaaaattctccaccgtgcgaagcagctccatgaagaagggtatatattcactcatgctcccgttcatttttattccatttttgaagggaagctgacgcttgcggattatctgaagcttgatgaagccatcattttatattatttccaggcttgggaggaagaagaggacccgattctgtccgacttgtgccgccgcttcattaaccgccagctgtttcaatatgccgaatttaaccccaatgaggaaatgtcggcttattttgaactgaccgctctgtttaaagaggcgggaattgatcccaattactatttagtggtcgattcttcatcggatctgccgtatgatttttaccggccgggtgaagaggaggagcgtctgccgattcacctgttaacgcagaacggccagatcaaagagctgtccaggcagtccgccattgtcgaatccatttcgggcaaacgccggacggaccataagctctactatccgatggacctcatttgtgacgattcagaaaaccctgaagcaaaattaaaaatccggcagctgctgggactgacatagaaggattttggtaaagaaggaaaaggagatgtcgggaatttgttgaaagaacatgcaaaactgatgaaggtgttctcggattctggagaaatcatcgggcggaaaaagctgcagaaaatcatttatatcgcgaagaaaatgcagtatcctttctacgaaaaatatgattttcatttttacggcccgtattccgaagaactgacgcttcgaattgaagagctgtgcaatcttgggtttctggatgaggtgaaggaaaaaaagggcggctactttcaataccggtactcgctgacggagacgggagccgagtttttacatcatgcggagcttacgatgccggatatgaagaagtacatcgacagcgtcaacagccgctcatcgcggtttctggagctggtgtctacgattttgtattttgacggccttgaagctgaggaaaagaaagagaaagtgtttacgataaaaagcaaacagaaatatacggatgaagaatatgatgaggcgcttcactacatagaagagctgaaacacatttgttagaggcgatggctttcgtcttttttgatgaaaaaaccaggccgcgataaagcgggcctggttttgtttattgtctcaatttgctgtgcttgtacgaatataaaaagtaaacgatgacgccgatgatcagccagacggcaaaataaagccacgttttcagcggcagattgaccattaaaaacaaacagcagataatggccaaaatcggcagtactggtacaaaaggcactttaaatccccgcggcagatccttatgggtgcggcgcagaatcagcacggacagactgaccatggcaaatgtcaatagcgcgccgatgtttgagagatctgacagctctttcagatcaacaaaacccgcgatgcaggcactgatcagtccgatcagccacgtattaaagatcggagctcccgatttctttccgacaatggtaaagactttcggcagcattccgtctcttgccatcgcaaaagatatacgggtcgccgcatatgtatgggcgagaacgacggccatcagtccgatcaccgcaccggcagcgataacgcccgccaccgcgttttgtcctacagtctgtaacacataagacatggcttccggcacattaagctgtgaatacggaaccatacccgtcatgacgagacagacgatgacgtatacaaatgtacagatcaccagtgaaccgataataccgatcggcaggttgcgctgcggttttttgacttcttcagccgaagcggaaatcgcgtcaaatccgagaaacgcaaaaaagacggcagaagcccccgtaatgacgcctttgattccaaaaggcataaaaggatgccaattgcccggctttacaaaaaagcttcctgtgatgataaacagcaaaacaattccgatttttacgagaaccattatattattaaaggttttgctctctttggagccgcgtgacagaacgacggcaattaatagagtaatgatgatggcaggaaggttgacgatgcccccctggctcggcacgtgcagcagactgtccggcaaaggcatgccgatttcggctaacagattattaaaataacttgaccagccgcttgccaccgccgacgccgtcaccatataaacggataagagcgtccagcccattaaatggccgacaatttctcccatggtggtataagagtaaatataggcgcttccgtaaaccgggagaacagaagcgatttcggcgtaacataatgctgcaaggctgcagacaacggctgcaatgataaaagaaaagattacggaaggcccggcatttttcgcggccgtaatgcctgtaagaaccatgacgcccgtcccgatgacggcgccgatgcccagtaaagttaaatcaaatccacccatcgttttggcagtctgcctgtttctgctttgttcaagcagctgggtgatgtcttttttttgtaggatattccgcaacacgcatccctccatccaaaagcaaaagccaagaggggctctttggcttttacccgtgtcacatcttctgtgtaatcgacaatcctgtgttctgtttccccgtctgttccgtttcttttccagtcatattgtctgccgcatccgatcagattatcctttccgtcaaacgcagtcacccttaatgattttacctgaatcatgtctataaaaccagcattgcataaaagggatgggtgaaaaagtaggagataatagtctgtatagggcaggataaaagttgcgggctttccggccgaaattttgactttccccgcgaggtatcagtaaaatgtaataaaaaacaatcaaatgatgatggatgcatcttgaaatggggagtttctgcatggagcacgatatattgcaagcaaatgtactggattacgcgctcacgaaatatttaaagagcactaaaaagcttgatgaggcgacaattccgaaaagtataaacaatatcagaggatttattctcaggattatttaccggcacggcacgtgcacgattaaagatatattgcaggaagtcacattatcgccttcggccacgacaaccgctctgaatcatttagaaaaagagggtttcgtggaaaggtcgagaaataacgaagaccgacgcacggtatggatgacgctttctgaatcgggaaaaatggcggccatgcaaatgattgaaaaccggcagatgctcattgacgagctgtttgaagcattgacagaggaagaaaagaacacctttttcagcctcgttgaaaaagtaatgaaataagccggcctgacatagcagcgccggccgttatcaaggattactccgtatcgctgatccgtttgccggcgacggcgtaatgatcctttctcatttcttcaatcatgacaatgatcttttcttcggctgcgcctgtcgtttcttttacggcttctgtcactttttcaaccagattccgtttttgttcatctgtgcggccttcaagcattttaacggttacgagcggcatggtgctgatcctcctttatcgtttcctctctttggaagagaggtcacttatagtatactgaatgaaggacaatcttgcattttttaaaaaaggggatttttacatttggacagatttttatattatccgctggagcttatgccctatgtcgtgattacgctgatcgtggcatttacgatgcatgaactggcgcacgcgtatgtcgcgtatcggttcggagacgataccgcggcgagacagggcagattaacgctcaatccgattaaacatcttgatgttttcggaacgattctaattttggtcgcgggtttcggctgggcccgtccggtgccggtgaaccgccgcgcctttaaaagaccgcggctggcgggagtgctggtttccgtcgccgggcctgtaagcaacctgcttcttgcctttatcggtttctttttgctagtgttgatgcatgcttacggaatggagctgctttctgcattcagcatggggcttgaccgctttttctctatttggattcagctgaatctcgcgctgtgtttattcaacctgctgccgcttcctccgcttgacggctaccggattattgaggatctcgtgccgccgcgggtgcgcgccaaaatgactcagtttgagagctacgggattatcgtgtttctcgtgctgtttgtgacaccggtcggctcctatgtcgtgtggccgctgttaagcgaggggagagactggattctcaaggtatttgccattatatttcaaccgcttttgtaggagggtattttcatggaagaaaaaaagaagaaaacaatcggatttaatattattaaaagtgatccgaccgacggacatggcggttttggcgccggggcgctgagccttgacaatatttctccggtatttgtcgatgtggaagagaaggaagccttcgttgacatcggcgcaatgcatgcccgcagtgtcgttgaaaaaggcatcaaattcctgccgaacaaagatgaagtgccgaacggaaaaccgtactggctcgtgtgggtcaccatcgacagaaaagaagaaggcccttattacgcgggtgtgacggcttgtgaaatgaccgtggacagaagtatccgcagaggctataagtcattgccggagcatgtgaatttaatggataaatcaatgaagcgctgcattatcgtggacaaaatggacgccagctcaaagcaggtgcttgctgaatttctgcagaagcatgaccaagggctctgggaacgttcatccgatgaattgaaaacaggtctgcttccggaagaaaaataatttgtgaactttttgtgaactttataaatatttgcactattttgcaattgtactgagtaaactgttgatacagaatcaggacatggaaagtcccgagccgaaccaagactcggggtttttcatgtttacgcggaggtttcatcatgttcaccgtctttgaaatcgggccttgggtcattgaagcagatgcggcggaaacgggaaaacaatacgaaaaatcatggcctgatccttgcgattgcgggcactgccggaacttttccgaggcggtgaatctccttcccgccgagaaaacaaggctgtttacgcagtttgggattcgtccggctgtctgtcacgacttgggggagcatggaaaggaaaacggcctgcatcattatgcgggcagctatccgattgtcggcaggtttagggaaggctggccgaagtttcatatcgagagggcgggagatatccgcttttcgttttcattgccgagtacaacattttttataccgaagggttttcctgaccctattatccatctcgacttttctcttttgctcccatgggtgcttgaggaagacgcggattaaagcccggcgcgcaatgcaccgggctcagtcttttttgccgagccacttatcccaccattttttgcgcggagcttctttgcgggcgggggcgtgttccttttcttttttagacggttccgctccgtagcacacatccgcgggctcagtgcctgcgatgaaatacgtataatgctttgcgtcgcagccgggtcccgaagtgtagccggaagcgggatcgatatagacgcccgtgacgcccttcggcggtttaagcgctatttccggttctccttcgagcgccttctccataaaatctgcccaaatcgtcttcgcatagcttttttcttctactgaatcaatcgtgctgcttttgtcatagcctgtccatacaccggcggcaagagccgggttaaagccgatcatccagctgtctgcgctcgttgtgcctgatttaccgccataggttcgggtcagccgatcagaaatggtgcgtcccgtgacggaagtatagccgtttaaatcctgatcaaacatgcccgtcatcatgctcgccgtcacaaaagcggcttttttatcaagcgtctgctgatgtccgcgcggctgttcatacaagacgttgccggcggtatccgtcacttttgtgataaaggaaggggtgatttgttttcccccgtttgcgagcatcgcgtaggcattaaccatctcaatcgggcgcacgggttcagttccgagcgccagagacggaaggggctttaaatgttcgctgatgccgaattcctttgccgccgacacaagcttattcatgccgagaaagagatgggtcttcacggcataaatgttgtctgacaacgcaagcgcctgaagcagcgtaatcggtttattggcgtagtagccgttgtaattgcttggagaataagtatctccgttgtcgtcaatctggaactctgtggcttcgcttttcatcagcgtgaccggtgtaaagccgctttgaatcgctttgtagtacaaaagcggcttgatcgtggaagccggctgccgtttcgcctgtgtcgcccggtcaaacgggcttttttcgtagtcacgtccgccgagaagcgcaagcacgcgccctgttgccggatcaatcgcggaaaagccgacctgaatgtcagagccggtacggatcgtatgtgccacagtgttttccgcaatccgctgcatgcgcttatcaagcgtcgtataaacacgcaatccgctcgttgcgagctgttcgcgcgtcatgccgagctttttctcgagttctttcatcgcatcatcgtaaaaataaggcgccgttttcgctgcggttctgtttttcagcggctgataggcaagcggcattttcttaagcctttctgccttcgtttttgagatcattttctgttcagtcatcagtcggagaatggtttcctggcgctgtttggccttcttttcgctgacatatggcgaatagccggacgggcctttcggtatgcccgccagaagcacggcttccgcatcgttcagatctttggcgtgtttgccgaaatacaggcgggaggcggcttcaattccatatgcgccgtggccgtaatatatcgtatttacataaccttctaaaatctcgtttttagaatagttctgttcaaggcggatcgtgtaaaatgcttcattccattttcgtttccatgtcttatcatgctcaaggtagagatttctcgcgtattgctgggtgatggtgcttgcgccctgaaccttggccattgcctttatgtcagccagcgcggcggcggccatccgccggtaatcaaaaccgtggtgattgtaaaagttttgatcctccaccgcaatggcggcctgcaccgctatcggattgatatcttttaaccggacccagtagcgcttttccccgaaatcggtctcacctagctttgagccgtcatttgcataaagaatcgtagactgagggacccggacggagggggccccctgccatttcgctgcaagaagaacggatgtgaagcagacgccggccagcattccgccgatcagtgtcagaaagatgcaggcgcggatgattttgaacgtgattctgagctgttttccagatactttatccacttttgggaaccccctttttcatgattctattattatgtgaaaaaagggggttttttaaacatatcaaaccggacacttctttactttttcccctccatcctctatactttttccttaggtgaaaatgagattttaaccggaataaaagcgatacagacgcttacaataaatgaaataagccttgaaagggagatgacaattgagcgagctttggtatacggagaagcagacgaagaatttcggcattacattaaaggtgaaacaaacattacatacggaacagacggaatttcagcatctggaaatggtggagacagaagaattcggcaacatgctgttcttagacggaatggtcatgacttctgaaaaagacgaattcgtctatcatgaaatggttgcgcacgtcccgttatttacgcacccgaatccggaaaacgtcctcgttgtcggcggcggagacggcggtgtcatcagagagattctgaagcacccaagcgtaaaaaaagcgacgcttgtcgacattgacggcaaggttattgaatactctaaaaaattccttccgtccattgcgggcaagcttgatgatccgcgcgtcgacgtgagagtcgatgacggtttcatgcacatcgcgaaatcagagaatgagtatgacgtcatcatggttgattcaacagaaccggtcggaccggcagtcaatctgttctcaaaaggcttctatgccggaatttccaaggcgttaaaagaagacggcatcttcgtcgcgcagacggacaacccgtggtttacaccggaactgattacaaacgtacagcgtgacgtgaaagaaatcttcccgatcacccgtctgtatacggctaatatcccgacgtacccgagcggcctgtggacatttacgatcggttctaaaaagtacgatccgcttgaagtggaggacagccgtttctttgacatcgacacgaaatattatacgaaagagcttcacaaagcggcatttgttcttccgaaatttgtgagcgatttaatcaaataaaaacgtacggcgcaggagcgaatcttgcgcttttttacaggaaagcgagggttttatcatgaggtttgatgaagcatattcaggaaaagtatttatcgcaagccgccccgactggaaagaggcggacgccatcctttacggcatgccgatggattggacggtcagctaccgtccgggttcgcggtttggcccggggagaatccgcgaggtgtctatcggtcttgaagaatacagcccgtatctcgaccgtgacttggctgatttgaatttctttgacgccggcgacattccgcttccgttcggcaatccgcaaagaagccttgatatgattgaagaatacgtggacggcattttagaaaaaggaaagttcccgctcggcatgggaggggagcaccttgtatcatggcctgtcataaaagccatgtataagaagtttccggaccttgccatcattcattttgacgcgcacaccgacctgcgcacggattatgaaggcgaaccgctttcccactctactccgatccgcaaagcggccgagctcatcgggccgcaaaacgtattttcattcggcatccgttccggaatgaaggaagaatttgaatgggcgaaagaaaacggcatgcacatttctaagtttgaagtgcttgagcctctgaaaaaagtgctgccgcagcttgcgggacgccctgtttatgtcaccatcgatatcgacgtgcttgaccccgctcatgcgccgggcacgggcacggttgacgcaggaggcatcacgtctaaagaattgctcgcgtccatccatgaaatcgcgcgctcagaagttaacgtaaaaggcgctgacctcgtagaagtcgcgccggtctatgaccactcagaacaaaccgcaaacacggcaagcaagatgattcgtgaaatgctgcttgggtttgtgaaatagaaagaagaaaacccggaataacagggcgaagcagcctttgttccgggttttttgtaataggaattaaaacactcgaggggattgtccccgtaaacctaaaatgaaatctttcatcataaatttagatcatggcgcgttcagacacataataatgaggagttaagctattcattatccctgctgatactaatatcgtactcacagcaaaacagactataagtaatttatacttcaatttcatataaattcactcctccttcgatctgctgtctggcttcttcgacctttaaaaagtagacagaagcttttttatattcttcttgtgtgtaataatatttagctacatcaagggctaattcctcaatatcagcatacatcaatttattttcaagaaaatgcagacaatcgtttattaatgtatctcttggatctggcatatataagtattctaaaaatttaaatttttcctcgtaaattatatcatctattttcttacatattgagataccttttttatgataatcgtacgcgttatctatattttttagcttaaaataaatctgtgtaagtaagaagtagggctgcggaagtgaatgactcatttgagctttttcaaaaacagctatggcttcttttaaatggggaatagcctcgactttattgttttgattattatggcataaagcgatgttaaaaagtgtcctccccattaattgcggctgctgctccaattcagccatcgtatatgccttttgaaagtgggaaatcgcgtgatcgtattgctttacatcaagataattagccccaaataaagaatggcactgggttaatctaatattatatttttctgcatctttataaattaaataagcctgccgcgcataatccatcgatacataagtttgtttcatataataatagacttctgacattttaaagtaaaattcagctttttctatatgatctttaacgtacatcagtttgctttcagctttcttaaaaaactgaatcgctgaaagatattcacggcattccagctcatacatcccccggaaaaaattaaaataataatcaagacgtccggtcagccgggcctgctttttatcaatatccgcgagcagatccgatagtctcggctgttcttctatccgctgcgattccagcggttcgaggtattcgagcatcagattgtggcggaattccatgagagaatagtatagatgaagatcctgatcatcttccagacctgcaagttcttctttgatttctctccgcaagtactcggcgtccgggatgctgaaccttcgaatgtacatataccattcgttgattttttctccaaccgctgaagatgataaaacactcgccactattcccaatccctcccttccacgttatgtatatgacatattttatcattttcattcggaaggatagcgcaaaaataccgcaatgttttctttcgttaaaaccgcatgtctgcggatatcatttcaaaaatccactattatccccacaatttgtacaagcaaacaaatacaccttcccatattctgttgtatctgcgtgagcagtgtatgtctgaaaaggaagtgaagatatgagaaataacaaactttcctttaaagaaaaagcaggagccgcacaagaagaatgtttatgtttttgcgaggaagaagcaagccgtgaagcgatgtttcaagcgccgattgaattgcctgaggggtttgtcgttgatccggctgaagctgttgcaaacgtgacgtggaatgcagacagcctttcttgtgtcattgaacgctgtttcattgagacggggccagagcctgatgaaatcggtgttcaattcgcagtgcgcctgcagggaactgttacgcttctcgtcagtgtctcaccagtgcgaaatcaatatggacaagggaacgggtctgtttctgtcatccgcaatgcagagattgaccaagtcgtctattattccgatgagcctgatgattgcccggatgtcagtgacattacgatcgagaaccttattgtcgttccgccattctatggcagtcctttatcggtgacgggcacgattgtgcttgtgcccgaaccggaacccgtttatgcgtttacagcgaatccaaacgatcaatcggtttctgtgatagttacaaacactcacaccgttgtgtcaaaaattgctcttccgtaccggccgacaggtattgaaataactccggataaaagcgcagtgtttgttttgcacttcaacaataatgtgatttctgtcatcgattatgacactttaacagtgacagcatccatactgctggaacagccgcctggatcgataaaatgtatcccaaatcatgagtttgcttatgttctcggcgatactgcgatttatgtgattggaattgatacgttaactgtggataggtcgattcctgtggaaggatttgattttgcaattgatcccaatggattattcgcctatgttcttgattttggttcagtgcaaaaagcggacctattcaccggtgaagtcacaggaacgattgaacgagagcttatcgtatcatctatagaaacaaattggccggagcggtatgcgtatgtcttagaacaagaattcttattcaattatttgacggttattgacttaaatacgtttacgatcagcattacccaagagctggagcctgatggccaatatgtaatgtttacgagtggatcagaggtgtatttacatgacagcttcactggcaatttatatgctgtcagtccgaatggtgcaggcgttataggcaatgttccgcaatcggcaagagactttgcgtttactccgaatggcgaatttctgtatgctgctcattttttagagcagaacatcactgtttacaacacggatgattattctgtggaaactgtgatatctcttggggtttcaccgggagatattgtgatttaaccaactgcatgctgtacatttctaaaaggacgtgaattcatgaaaaagaatgatctgtctgctttacaggaaaattgtttctgtttttgtgatgaggaaattagcagagaagcgccgtttcaagtgccgattgacattcccgaggggttcaccattgattctgccgaagcagctgcgacggttacatggagtactgctcatttattatgtatcagtgagccttgcttaatccagattgggccggaaccagaagatatcggtgttcgatatgccgtgagagttaaagggaccgttacgcttcttgtcagtgtgtcgcctgtacgaaatcaatatggacaaggggacgggtctgtttctgtgattcatactgaagagattgatcaagttgtttattatgcagcgcagtctggccgctgtcctgatttcagtcagataacagtggaagatcttctcattgtaccgcctttctacggcagtccgcttacggtgaccggtacacttgttttaccgccatcgccagaccctcaatcgtatgtgtttacagccaattcaggagacagcacggtttcggttactgattcagatttaaacactgttgtaaaaacaatccctttttctgacgtgccaactaatctaggcgttactttcgataaagctttcacgtatgtcctccatgggaataccaaccttgtctcagtgctagataataaaactttaaccatcataaataccatcactgttggaggagggccgagaaaggttgaatttgatttaacagatgagttcgcgtacgtgatggccgccggatctatatatatgatcaacatggcctctcaatcggtcattgatgtcattccgatacccggcgctttagactttgctcttgatcccaatggacagtatgtctataccgctaatggaagcagttggtcggttgataaatatgatgtaaatactgggcagttggtagaaagtatcatagatacatttgaatttcccagtttaattgccactccttacgctggaaattttgcgtatgtgttgaatggtgagctgctgccgaaaggtgtaacggagatcagtttgtcaccattaagcaggggaggcgacttcaaccgtttatttgaaactctgaggacgattgtattttctcgcgatagcactagggcttattttctagagccatatagtgaaccgtttctcattaataacttatacgtagttaatacggctggacagagtatcattgcaaacgtgtctctgcccggcgcctttgacctcgccgtaacacctgataatcagtacatttatgcagcacagcccgacgacaataccgtaaccgtgtaccgcacgagtgattatacagccatgacggtgattccggttgggactggtccgtcagcgattgcgatgtagcttatttcacaggttgagagaagcagagctgcgataaaaaaatcgtttataaataaatgagccgatctgctggatggcagccaggatgattaaaaacagcagttcacttatggtgaaactgagcatccaccaaaccccggctcctgtcagcgctcccgcaagcccttttttgaacaggctgccatgctggaaaagctgcagcaagtacgtctgcataaaatacaataaatacaaaatcagtaacagcgcgagtcccattgatacggcaaggggcgtgtgaaagcggaaagggacggctttgacgatttcgaacacgcagccgaatatgatgacttggcataatacagcagccatcacgtgtgtttggcggacgtttttatagctgtcacgcagcgctttgacatcgttggcatttctgctgcacaatctatgctgctggaagtcgcagcagcttcgatgagactgtttgggtttctgaaaagctgctgtcatgtttttcacggattgggtgacataatgatatgattttctcttctcataaggaactgctttttatgaggtttatcttcaaatctaatgagcaatgatggtaagatagaagcagttgaagtttacaaactgaaggattatactattcaagtcaaagcggaatgatgaaaaggacgtgtcaaaatgaaacaagagacaccgataacactccatgtgaagtctgtgatcgaggatgacggaaatgaggaagtcatcgaattccgtactaccggattttactatgtaaaacaacaaaaagtgtatctatcttattatgaagaacacgacctgggcaaagtaaaaacgattgtgaaggtgagcgaaggcgaagtcctgatcatgaggtcaggcgctgttaaaatgaatcagcgtttcataacgggagcttccacaattgcgaaatataaaatgtcatttggtgagcttgagctgcaaacaagcacaaaatcgattcaatctgatctcggtgaagaaaaaggccgaatcagcatcgcatatgacatgcatgtcggagacgagcagcagcatttacataatatgacgatcacgtatgagggaggaactcacgcatgaatattgcggaacaaatgaaggacgtgctgaaggatgagatcaaagcggccgttctgaaagcgggcctggcggacgaaagccagattccaagcgtactgttagaaacgccgaaagaaaaaacacacggtgattattccacaaacatggcgatgcagctggcgagaatcgcaaaaaaagcgccgcgccaaatcgctgaggagatcgtggcttcatttgataaaggcaaagcttccattgaaaagatggatattgcgggacccggctttatcaacttttacatgaacaacagctacttaacaaaactgattccgtccgtgcttgaagcgggtgaacattacggagagacaaacatcggacaaggcgaaaagattcaggtcgaattcgtatcggccaacccgacgggagatcttcacttaggccatgcgcgcggcgcggcggtaggtgacgcgctgtgcagcgtgctttctaaagcgggctatgatgtgagccgcgaatactatattaatgatgcgggcaaccagattaacaacctggcgctttccgttgaagtccgttattttgaagcgctcggtctcgagaaaccgatgccggaagacggctaccgcggcgaggatattatcgccatcgggaaaaagcttgccgaagatttcggcgaccgtttcgtacacgaagaggagagcgaacgtcaggcgtttttccgtgaatacggcttaaagtacgagcttgataaacttcgctccgacctggaaaatttccgcgtgccgtttgacgtatggtattctgaaacgtcactgtacgaaaacggaaaaattgatcaggcgctcgaggcgcttcgcgaaaagggccatgtatacgaagaggacggcgcgacatggttccgttccacaacgttcggcgacgataaagaccgtgtgctgatcaaaaaagacggctcatacacttatttgctgccggatatcgcataccataaagacaaacttgaccgcggattcgacaagctcatcaatgtatggggcgcggatcaccacgggtatattccgcgtatgaaagcggcaattgaagcgctcggttacaagaaaggcacattggaagttgagatcattcagctcgttcatttatacaaaaacggcgaaaaaatgaagatgagcaaacgtacggggaaagccgtaacgatgcgcgacctgattgaagaggtcggccttgacgcggtccgttatttcttcgcgatgcgcagtgctgatacgcacatggattttgacttggatcttgccgtatccacatctaacgaaaaccctgtgtattatgcgcaatacgcacatgcacgtatttgcagcatgcttcgccaaggggaggagcagggacttaaaccggcggcagatcttgatttcagccatattcaatcagaaaaagaatatgacctgctgaaaacgatcggcggcttccctgaggcagtggcagaagcggcggaaaaacgcattcctcaccgtgtcacaaactatatttatgatctggcttccgctctgcacagcttctacaatgcggagaaagtcatcgatccggaaaataaagagaagagccgcgcgcgtctcgctttaatgaaggcgacgcaaattacgctgaacaatgcgcttcagctgatcggcgtatccgctccggaaaaaatgtaatgatgatcaaaggacaaagtcttcgggctttgttctttttttgtatataaagcgtgtgatgtaattcacaatcccgcacactgagtttttgtatgataagactgatattgaatcagtgaaaggggcaagccgaatgatcaatcgtcaacatattcaattatcgttgcagtcattaagcttagtggcagggtttatggtgtgggtgctgatttcatcgctcatttctcaaatgacatcagatatttatttaagcaaaggcgagatttcattggtgacggcgattcccgttattctcggatcgcttctccgtattcctttaggatatttaacgaacaggtatggcgcgcggctgatgtttatgatcagcttcatcctgcttttgtttcctgtattttggatcagtatcgcggattctttatttgatttaatcgcgggcggctttttcttagggatcgggggagcggtattctccatcggagtaacgtccctcccgaaatattatccgaaagaaaagcacggtgtcgtcaatgggatttacggtgccggaaacatcggcaccgccgttactacctttgcggcgccggttatcgctcaagccgcgggatggaaagcaaccgtgcagatgtatcttgttttgctggctgttttcgcattactgcacgttttgttcggcgaccggcatgagaagaaagtcaaagtttccataaagacacaaatgaaagccgtttaccgaaatcatgtgctgtggatgttgagcctgttttattttattacgttcggcgcctttgtcgcctttaccatctatcttccgaattttttggttgagcattttgggctgagccctgcggacgccggtctgcggacggccggctttattgcggtctctacactgctcaggcctgtgggagggtttcttgcagataaactgagcccgctccgtattctgatgttcgttttcgcagggcttacgctgtcaggcgtcatgctgtcattctccccgacgatcggtctttatgcgttcggatcgctgacggtggcagtctgctcagggattggaaacgggactgtatttaaactggtgcctttctacttttcgaagcaagcgggaattgccaacggtattgtgtcagctatgggcggactgggcggttttttccctccgctgattctggcaagtgtatttcaggcaacaggccaatacgcgatcgggtttatggcgctttcagaggtcgcgttagccagctttgttcttgtgatctggatgtattggcaggaaaaaatgaaaacacatacggagagaaacagtcagagcctcaattcataatgatccattcacaagattgttagttttttctgggtgagtgcaaatcaagtcacgttacaatatacatacgcaacgtgactttcttcgaggtgagctcatgaatattctctctgtccgaaaatctgataaagaacttctttcccgcgaactgcatgaattgctggaatcgatcagtacgaaaaggaaaatgaaaaaacacacgtatttgtttcaagaaggaatggatgcaaaagagctttatctgattcaatcaggactcattgaaatcggcaagctgacgtctgacggaaaagacctgacgcttagaatctgccaaaaaaacgatattgtcggggaattgacgctattcacagatgagccgagatatatgctcagtgcgaaagtgttagaggatggcgaggtgctcgtcatcaataaaaacaagctggaaaaggaattgatccaaaacggtgttttgacgtttgaatttatgaaatggatgagcacccatcttcgaaaaatccagtccaagatcagggacctgcttcttcacggcaaaaagggggcgctctattccacccttatccgcttatcaaacagctacggggtggaacgaagcgacgggattctgattaacattgtgctgacaaatcaggatttggctaagttttgcgcggcggcaagggagagcgtcaaccgcatgctgggagacctccgcaaacaaggggttatttcgatagacgaaaccggaaaaattattttgcacaagcgggactatttacggtgtgagatcgagtgtgaaaattgtccgcttgagatctgcaatattgactgaaaaaaacaaggacagcgctgtccttgtttttcagcttgtgatacatatacacatgacggcgaaaaagaagccggcatttacgatttccagaatgccgatcgttttcaccggccagtctcttccgtgaaaaaaccaggcccgcagactgcttgggataaaagcgagaaacgcccagcctgccccgagaagagccgataaaaaggggagcaagaggtgatatccccacgaccagtatgcaaaggttctgttttttctctcccgtatgaccgatttcacataaaaagaactcccgacaaaaaataaagcggattgcaagaatagaaaccaagcccagccgtcaagggttcccgttcccagccagcagctcgcaagcccgcctgaacaaaagaacagaacacctgcaatatcattcgtgagcgcccgttcgttttttcggcgggcataatgcgtatgtatgagaaacagcggcaataaaaaaacgccgatccagacgagctgcggcttatgaaagacagaaatgatcaaaaagcagcaggccggaaaaccgtaataccatatccacttttgatagggctgaagctgtttctttttcaaagcgagcgaaacgggataaaccgtcaagtaaaggaacagccagcccaaaaagagcggaatatgccagaaaaccgggcctcccttgaccatgccgagtaaaaatggaatcagcagcatcgcccatgcgccgtgctgcttcggaatcaacgccttcatcgaaaccctcctttttatttcattataagtgcaaacactctcctgataagtgacttttatcatacaagctgtgaaatacatcactgccgcgcgggctcaatcgggctacactaaagctatccttagcacaggaggctttcctatgaatcagtgtgactatttattatttctgaaacaacttcctatgtttaatgaagtgcctctgtccattgtcgaaaccttgctgaaaaacgggacgtttatccgcggctcatctgaccaatctccatcctttcttcattcacaatccgtttatattgtattaaaaggcaatatccgttttacggacagcaggctccctgaagggtcgcaaaccgttgcgctgtgggaaaaaggcgatgtgtttccgattgatgaaaaaggcgggctctctttatcgccttttatctcagtcaatgcctcaccggatattctggtactccatattccatattccgtatttaagcaaatgatgtcttaccatccgcggctgcaaatgaactttttggcgatgcttcagcaaaatgtcttctgttcctatcagttgtttttgcggtatctgcatacatcacgggatgaaaacgtcgaacccggttcttaaacagaaccggtttttttgatgacgccgggcgtccccatatcgtttgaaaatccttcctgctgctctgtgtgaacgttttgtgaaaaaagcagagtgtgtgacatagttcacaaggtgatgcgccgtctctgtttatagtgtacatagcatcacctgactcggaaggagtgaacgatcatgaagaaaaagaaaatgagtccgttgctcaggagattaaactatttttctcctatcgaacatcattcaaataaccatagccaaacgacaagcgaagatcgtgattgggagaatgtatacaaaaacagatggcagtacgacaaagtcgttcgctccacccacggcgtcaactgtacgggttcttgcagctggaatatttatgtgaaaaacggaattgtcacgtgggaaggacaaaacttgaattatccatcaacaggcccggatatgcctgatttcgaaccgagaggctgtccgcggggggccagtttttcttggtacatctacagcccgctccgtgtgaaatatccatatgtgcgcggtgtgctgatcaatttgtggcgggaagcattgcaggcgcatcaaaatccgctggatgcctggaaatcgatcgtcgaaaaccctgaaacagcgaagtcctataaacaggcaagggggaaaggcggctttgtccgcgcggaatggccggaggtgctgaagctgatttcagcctctctgctgtatacagtgatgaaatacgggcctgaccggaatgtcggtttttctccgatcccggcgatgtccatgatcagccacgcatcaggttcgcgattcatgtcgttaatcggcggcccaatgctcagtttttatgactggtatgcggatcttccgccggcgtccccgcaaatttggggcgaccagacggacgttccggagagcagtgattggtacaattcaggctatatcatcacatggggctccaacgttccgttaacgagaacgcctgatgcgcattttctggcggaagcccgctataaaggcgccaaggtcatttcgatcagtcccgattttgcggaatcctcaaagtttgcggatgactggctgagcatccggcaggggactgacggggcgcttgcgatggcgatggggcacgtcattttgcaggaactttacgtgaaccaagaaactgaacgttttattgagtacgcgaagcaatacaccgattttccattcttcgtcactctgtcaaaagagaacggcgtgtatacagccgggcggtttctgcatgcgaaagacatcgggcggcagacaaagcatgatcaatggaagcctgcggtctggaatgaacagacaaacgaatttgccataccgcaaggaacaatgggctcccgctgggatgggcagcagaaatggaatctgcacatgatcgacgaagacaccggggaacagattaagccccgtctctccgtgctcggaatagaggacgaaatcggcatggtgcgcattccgtatttttcaaatgacggaaacaaagtgctggagcggaatctccctattaaaaaattggatctgaatggtgaggagacgtacgtcacgaccgtgtttgacttgatattggccaactacggcgtgaaccggggcatcggcggacaatcagccgcatcttatgatgatccccgtccgttcacacctgcctggcaggaacagatcacgggaattaaaagagaagccgttatacagattgccagggagtttgcccaaaatgcgatcgatacagacggccggtccatgattatcgtaggggccggcattaaccattggttcaactccgacacgatttaccgcgcggtgttaaatcttgttttactcgtaggcgcccaaggcgtaaacggcggaggctgggcccattacgtggggcaggaaaagctccgtcccgctgaagggtggcagacgattgcaaccgcaaaggactgggaaggcgtgcctaaactgcaaaacggcacctcgtttttctactttgcgacagaccagtggcgttatgaagaccagccgatcagtgacttggcttcaccgatcgcttcttcatcccgctacaagcatcacgccgattacaatgtgctggcggcgcgattagggtggcttccgtcttacccgacattcgatcaaaacggcattgatctgtacaaagaagctgagaaggcgggggcggcgacacctgaagacgtaggtgcgtacgtggcctcacggcttcaagagaaaaaactgaaattcgcgattgaagacccagacaatgaagtgaatttcccaaggaatctcttcgtatggcgggcaaatctgatctcaagctcaggaaaagggcatgaatactttcttaagcatctgctggggacgacgaacggtttgatgaatgacgacagcgacagcatccgccctgaagaaatcaaatggcgggagcaggcgccggaaggaaagctcgacttgttaatcaatctcgactttcgaatggcgggtacggcgctgtattccgatatcgtgctgccggcggcgacatggtatgaaaaacatgatctcagcagcacggatatgcatccgtttattcatccatttgctccggccatctcggcgccgtgggaatcgaagtcagactgggatattttcaaggcgctgtcaaaagccgtttccgatctggcggaagaagtcgatatggagccggtgaaagaggtagtcgcaacgccgctcctccacgacacgatgcaggaattggcccagccgttcggcaaaatcaatgactggagcaagggtgaatgtgaagccattccgggaaaaacgatgccgaacatccatgtcgttgaacgggattacaaacacatttttcataaaatgaccgcgctcggccctcatacggctttaaaaccgagcgggacaaaagggatgagctggtcgattgcggatgaatatgaatcactcaaacagagactgggagaaaccgattcaaacagcgttgccaaaggatgcccgaatataagtgaagcgaagcaggcggcggaagcgattttaaccctgtcgtccacctccaatggaaaagtcgccgtgaaagcatgggaatcacttgaaaacatcacaaacctgaagctgaaagacctggcggaagagcgcgaggaagaatgctttacgttcgagcaaattacagcccagccgaaaacggtcatcacctctccggcctttaccggctcagaaaaaggagggcgcaggtattcgccgtttacgacgaatgtggaaaaattaattccgtggcggacgctgacaggcagacaatcctattatgtcgatcatgaactgatgatggaattcggtgaaacgatggcgacatttaaaccgatcctccagcaccgtccgttcctaagcaagcggcctgatcaagagggcaaagagatcgttcttaattatttgacgccgcataataaatggtccgtccacagcatgtattttgattctctgccgatgctgacgctgttccgcggcgggccgaccgtgtggatgaataaagatgatgctgcggatacggatatcaaagacaacgattggattgaatgcttcaaccgaaacggtgttgtcgtcgcgagagcggttttgtctcaccggattcctaaaggaatggcatttatgcaccatgcccaggaccgccacatcaacgtgcccggcacaaaactgacgaataaccgcggaggcacccataacagcccgacaaggattcacgtcaagccgacccagatgatcgggggctatgcccagctcagttacggctttaactattacggtccgacggggaatcagcgcgatctgaatgtcgtcatccgcaagctgaaggaggtcgattggcttgaagattaaagcgcaaatcgggatggtcatgaacttggataaatgcatcggctgccacacgtgcagcgtcacctgcaaaaacacgtggacaaaccgttccggtgcggaatatatgtacttcaataatgtagaaacaaagcctggcatcggctacccgaagcaatgggaggaccaggacaaatataaaggcggctggacgttgaaaaaaggaaagcttgaactgaagtcaggcccgaaaacaaaccggcttgcaggccttttctataacccgaaccagccgacgattgatgactactatgaaccttggaactatgattatgaaacgttaacaaacagcccgcagaaaaaacaccagccggtggcgcgcccgaaatcgtccttaacgggggatttcatgaatatcgaatggggcccgaactgggaagatgatctcgcgggcggccatattacagggcttgaagatccaaacgttcaaaaaatggaggaatccattaaaacggaattcgatgaggtctttatgatgtatctgccgcgtatttgcgaacactgcatcaatccggcgtgcgtgtcctcctgtccttccggcgccatgtacaaacgcgatgaagacggcattgtgcttgtggatcaaaacgcatgccgttcatggaggtattgcgtgtcctcctgtccttataaaaaagtctattttaactggcagacgaacaaagcggaaaaatgcacactctgctttccgcgcttggaggcggggatgccgactatctgctctgaaacgtgtgtgggcagaatccgctatctcggcgtcatgctgtatgacgcggacaaagtggaggaagcggcatcggttgaaaatgaaaaggacctctaccattcccaactgaacgtttttcttgatccgaatgatcctgagattgccaaactggcaaaagaacaaggcatcccggctgaatggatagtggctgcgcagcaatcgccgatctataaaatgatcattgactggaagattgcgcttccgcttcaccctgagtaccgtacgctgccgatggtttggtacattccgccgctcagcccgattatgaatctctttgaaggaaaaggcagccggcaaacggcggaagcgatttttccggctatcgaccaaatgagaattccgattgactatttggcgcagctattaacggcgggggatacggatcatattcggtccacgttaaagaaaatgtctgtcatgcgccagtatatgagggcggtgcagacgaataaatccatcgacccggcattggtctccagtgtcggcttaaccgaacagcaaattgaagacatgtatcggctgctggcaatcgccaaatatgatgaccgctttgtgatcccgagcagccatcgtgaagaagtgtctgatttatacgctgaacaagggagctgcggcttatcattttcaggcggcccgggctcttgtttctaatttttcataaatgaggtgtaataacatgaacaccacagaccggcaaatgacgttctccgctctttccgttcttctctcatatccggaggaagagtggagagccgggcttcccgattggaaggctcttatccatgacatcaccaatcagcaaatccgtgagaaattgctgcactttttagaggcggcagccggcttttctccgcaagcgctgattgaacactatgtgtatacgttcgatttcggaaaaaaaacgaatatgtatgtcacctactttaactcaggcgagcagagggaacgcggcatcgaattgctgcatttaaaaaacacctaccagcaatccggtttcctgccgacagataaagaactgccagattacctgccgctgatgctggaattcgccgcggttgcggagattgaagcggcgagaagcgtgtttgaaaaatacctgtccaatgtgagggagctggcttcccgcctcgaaaaaaatgacagcttctatgctgagctgctgcgcgtgctgcaggccgcgctggaaaacatcggtgtacatgaaagcactgaagaaggggctgttcaggaatgagcgggcagatcctgtggggcgttatgccatacattgtattgacgatctttatcggcgggcatatttaccgctatcagcatgaccaattcggctggacggcgaaatcaagcgagctgttagaaaagaaaaaactcgccgctggcagcacactttttcattggggactgctatgcgttgtcggcggacatgtcatgggaattttgatcccggaaggcgtgtatgcttctcttggcatttccgagcatatgtatcacaaaatggcgattggcgcaggcctgccggcggggatcgcggcatgtaccggacttgtcatcctgacgtacagaaggctgtttgacaaaagaatccgcaaaaccagctcaccatcggatatcctgacgctcatcctgctgctttttatgatgctgtcgggcgttgcggccacgttcctcaacattgactcgaaaggatttgattacagggcaacagtcgggccatggttcagggaaatcgttttgttccgccctgacgcttctttaatggagagtgtcccgctatggtttaagtttcatatcatcatagggtacgtcgtttttatcctttggccgtttacaagattggttcacgtgttcagcctgccgctcaagtatttgacccgcagctatgttgtctatcggaaacgcacgtaaaaatcccccctgcaagagggggattttttatggtgaaaaaataaaaacataagatattttctgccaaggtaatggctgggcggcggggattcctgttatgttttatttggaaataacatcaacgaaaggagagtgaagaatgaagcggattttcctcattttagccgcctgtctgatgacaagcgccggcgtcctgacactcagacattctcatgtattaaccggcggcacagcgggactgtcactaagcctgtcatacgtgtttcattcctcgtttgcgattatcttctttctgattaatatcccgttttatatattttctctcatcagaatgggaatcaaattcactctatccaccgtttttgcagtcacagtgctgactctgtttaccggcgcggatcactggctgccgccggtctctgtttcaccgcttgccggggcgatttgcggcggggcgctgatcgggttgggcctgtcgctcatgttttatcatcaggcatcgctcggcggcgccaatatcctcgctttatttctgcaaaagcgctgcggatggaatccgggtgccgttaatttcctcttcgattttggcgtcgtgctggccggcattttctccgtcggattgctgaaagggctcttctccttagtgtcgatagcggtcaccggtctgatcatcggcatcttcaaaaataaaatcaaaggcagctgctcgctcaatccggcattgcttcagaacatcacacccggccaatcacaggaagcttcatcataagcctttccgctcgtgcggagaggctttttcatatgtttacaagccggaaaacagagggtatacagagatatcggatcagatgggggagagtcgggatgctgaaaaggagactggaattttgctttttatatatgatgcttatcggagcatatgtcatatggttttttccggtttccaggcttgagttttacggaggggtgctttgctatgcaagcattattttgttcagcatctattcgttaattcttgaaaaccgcacctcgcagcacacgctgttatggattcatattcttgtgttttttccgatcgccgggtacttattttaccttttttccggccagctttatgaaaaaggcaagctgttcaggtcgaaacggacatacaaccgggaaaagctgagaacgatatttgatatggaacaaactcccgatctgaccaggctgaaaggaaatcagaagcgtttctttcaatattcaatcaaggcgtcccatatgaatatcaatacaaaaagcaggctgaaggtgctcaaaaacggggacgaaacatttccggagctgtttgaagcgctccgggcggccgcgtcatttatacatattgagtattacatgttcaaatcagacatgctcgggcacaagatgatggacattatgatggaaaaggcgcgtcaaggcgtggaagtgcggtttttgttcgacgcggccggcagcctgaagctggccggaaaagatattaaaaaactgaaacgcgcgggcgtgaacatcgtcccgtttctgccgctgaaatacggtttttttaaccaaaaattcaatttcagaaatcaccgcaagatcgtcatcgttgacgggaaagtcggttttgtcggcgggctgaatgtcggcaaggagtatatcggcaaagaccaagatgtcggcttttggcgggacacccatatgaaagtcgaaggagaaatcgttcagacgctccacagcatttttatgctcgattgggaatacgtttcggatgaggtgctgattgatcagaaagcatacacccgcccggttacaacagaaagcggcggcgtctatcaagtcgttccgacgggccccgatatgaaggagcggatgagcgatctgtattatgccatgatagcggcggccgaatcgtctgtatggatcgcgacgccttatttcgtgccgaatgagccgatccgcacagcgctaaaggaggctgctgccagaggcgtccgggtgcgtgtcatggtgccggaaaccaatgacgggtttttaacccagtacgcgacgagatcgtatttccccgagcttcttcgcgaaggaatcgaagtctattcctatcaaaaaggctttatgcatcaaaaggtgctcatcactgacggaaacctcgcctctgtcgggacagcgaatatggacatgagaagttttcaactgaactttgaagtcaatgtcttttttacagatcaagaggcgatcaaagatcttgaagcgcattatctggaggatatgaaggagtctgaaaaaatcagccccgtccgtttctataagcgcacattatgggaaagaacgaaggaatccttcgcacggttattttccggcgttttataaaaaacgcttttaaaactccttgtgtatagtataattgagaaatattatcattaagaacgaagcacaaggaggacggaatcgtgctgcgacaatttttttcttattataaaccgtacaaaaagctgttttttctcgacttcttttctgccatcgccggcggattgatggagctgagttttcctctgattgtcaattactttatcgatacattgctcccggggcgggattggagtctgattattttgacttcggcggctttattcggggtgtacgccctcagctcggcgcttcagtatgttgtgacgtactggggtcatatgctcggcattaacattgaaaccgatatgcggaaaaagcttttcgaccatctgcaaaagctttcgttcaaattttacgataacaacaaaacgggcagtttaatgtccaagctcaccaatgatttgatgtatatcggagaaaccgcccaccacgggcctgaagacctgtttatcgcgatcatgacgattttgggcgcattcggtgtgatgctgtttattaactggcagcttgcgctgttgacttttatcattatgccggtcgtcatttggcttgctttgtatttcaataaaaaaatgacctctgcgtttacaaaactgaacaaagacgtcggggatttcagcgcgagggttgaaaacaatatcggcggcatccgtcttgttcaggctttcagcaatgaagcgtttgaaacgcagcggtttgacgtgaacaatcagcgtttccgcaaaacaaagctgacgtcatataaaatcatggcgaaaaacggctcgatcagttacatgctgacaagattcgtcacgctgttcgtcctgttgtgcgggacatggttcgtgatccgcggatcgttatcttacggggaattcgtcgcttttgtgctgctgacgaacgttctgttccgtccgattgataaaatcaacgcgattattgagatgtatccgagaggcattgccggttttaaaagctttatagaaatactggaaacggagcctgatatcaaggacgccccgaacgcgagacatgtgtccggtttaaaagggaatatccgttatgatcgtgtgtcattcggttacgaagaaaacagtccggttctgtcgggaatcaatttgtccattcatgccggggagacagtcgcattcgtcgggccttcgggagcgggaaaatcaacgctgacaagtctgctgccgcgcttttatgagccgtctgaaggcgtgatttccatcgacggaatcgatattaaggacatgacgctgtcatctctgcgcggacaaatcggcgtcgtccagcaggatgtctttctgttttccggcacattgcgggaaaacattgtttacgggcggctggacgcgtctgaggaagaaatctggcaggccgtccgccaggcgcatttagaggatttggtaaacgggtatcccgacggtttaaacacggtgatcggcgagcgcggcgtgaagctgtcaggcgggcagaagcagcggctttccatcgccagaatgtttttgaaaaacccgtcgatcttaattttagacgaggctacatcagccctcgatacagaaacggaagccgccattcaaaaatcgctgcaagagctgtctgaaggacgcacaacgcttgtgatcgcccatcggctggctacgattaaggatgcggaccggatcgtcgtcgtcacgaaagaaggcattgctgaacaaggtcatcataaggaactgctggcatccggcggcatgtaccagagactccatcaggcccaattcggcgagctgatacatcaataaaagaaaaaggatagacaaaaggggccgggcagcctcctgtctatcctttttttatgtagtccgtatttaatgggcttctttttgcgcgggttcgatgatatgtttgaaacggtcaacaagctgcaccgccttctttccttccactacaattaaatattcttgttctttatgggccattctgaacgtttccagctcaatgatatctttgattttgcacatcgtttttttagagtagatatacagctcgtggcctcccgtgtggcaaagctgataaagctgaagcatgtttcgtaaagtgaacttcttagcggctattttcaaagatgtaatgtttttcatatgttttctcctccgtctgatggtctgttatttcggaaattccccatataaacgggtgataaacctggttatgccttccacttcagcactccgcccgccaggcgtttgactccgcggatggcgcttaattcttcgacgagccgtagcagcgcccggtctttctctttcgcctcaatcataaagtcgatgtccgtatcccattgtctgaaccgctccagcaccggcagaataaaattcgcatccacatagtccgcatgactgcgtacggctgattctgattttggcgaggagagatggaccttcggctttaagccgatccgctgccatgttttgatcatccgcggaagaatgtcatctaaatcagcgtcatcggtcggattggcgtaaaaatggtgataatcaaacacaaacggaatgccttcttgttcacatatactgagtgtttcctcggacgtatatgttttatcatcgttttctaaagtcatccgctgtttgatgacatcgggaagttctttcagattcacgcggaaacggcaaagggcgctttgtttgtcaccgtaagcgcctccgacatggatgttgatgacggaacggtccgcgatgcccattgcgtccagcatgtcataatgataggccatatccttgaccgcattggcggtgatctcctgtttcgggcttgtaaaaatcgtgaattggttcggatgaaagctcgttcttaggtcatattttctgaccagctcgccgatctcacggaactcctggcgaaacggcgtgacaaaatcccacagcacatccggatgggtggcgagcggcacaatcgagcttgagaacctgtacagcgggatgccgtggctgatcacatagtggatcgtgcgcagtgtattggtgagattggctttcgtcacagaaagcagggcctctttctgctgactgcgggaaagcttggtatagcgcgcatatgttaaggtttttgcgggtgacgcgtcccaaaggcacatggcgtttgcgacgaatccgaatctgaacagcatatggtttctcctttataaaaagtaagatatggcctttcccagccattctgcaggaagctgtctgacggagcgctgtttcactttttctaatgtgagaagctcggatttttcgatgtcctgctttatggttgaaagcacttcctttgtaaaggcttcatcatgaatgatgacattcacctcttcattccagaacaggctccgtttatcaaaattcggcgtgccgataatgctgatgcggtcatctataatgaaggctttgacatgataaaagccttgataataccgatagatgaggcagccggccttcagaagctcgggataataggtaaaagctgtttcccgaacgagcgggtggtctgatttcatcggaacgatcaagatgactttgacgccttttcggcaggctgaaataagcgcttcctgaagctttttgctcggtacataataaggcgtgccgataatgatttttttctccgccttatggatgcagttttcataatgcgattcaagcgaaaacccgtcagatgcatatgtcctatgagagatattcccttcggataatgccggataaaccccgggtgatccgggtgcttttccggtgtttcgtttcagatcgcttacaaaaagagtctgaagatccgccgtgccttcgccggtcatccgcaggtgataatcctcccagtttccgaacttcgcttttttgccgaggtactcttcagcgatattaaaaccgccgacatacccgattttgccgtcaatgacggtcactttccggtgattccgtttttgcagcctgaaaaaaagaaacggaaatgccggtttatttagaaaatgaacgtgaacgccggcttttttcatcgtttgaatggaaggctttttcacttggcggctgcccgcccaatcgagcagcagatatacggagacgccggcctgagccttttctttcaataaatcaaacatctcatggctgacttggtcgttcttcataataaaaaacatcatatgaatagaagagacggcttggcggatatcggccgtcatctgccgcacaagctcgctgccgcagtgaatgagtgtgatatcactctttttcgggtcaaaaacgggctcatacgcctgttttttgtacgccgcccggccaagcagcatatcaagcagcataagtgcgatcaatatgataaaaatgacaagcaacacaaaaatgaccttcataccgacgctcctttccgaagtattcgtagtgtgccctgagaatgtgaatttaattattgactgaacactcattcattatttatgataaagtaaagatatgacaatgaagaggggaatcagaacaaagggggagacaagatgaacgcatttctcatggtaaacgcgctgctgttttcagctgtaaccgcttacgccgtttatttattcgtttacctgatcagaacgaggatcgcttatattaagctcggccaaagggaagaatttgataaacgcctgaaagaacgtcttcagaagatatgggtgaatgtgttcggacagaaaaaattactgaaagataaaaagagcggaatcatccacgttctgtttttttacggttttatactcgttcagttcggcgcaattgattttattctgaaagggctgcttcctgaccggcatctgccgttcggtccgctttatccggcgtttaccttttttcaggaaatcgtcacgtttctgattttaatcgccgtagtctgggcgttttaccggcgctacattgaaaagctcgtcagactgaaacgcgggtttaaagcggggcttgtcctcctgtttatcggcggactgatggtgacggtgcttctcgggaacgccatgaaccttttatggcacgatcattctctgtcttggacggagccgatcgcttcctccattgcgtttgtgctcggcggtctttcagcgccggcggccgccgccgtgttttatgtttcatggtggcttcatctgttatttttgctcagctttttagtgtacgtgccgcaatcaaagcatgcgcacttaattgcgggtccggcgaatgtgttcctcagcaggctggattcaaaaggaaagctggaaaaaatcgatttcaccgatgagacgaaagaaagctacggcgtcggaaagattgaagacttccgccgctctcagcttgtcgacctatacgcctgcgtcgaatgcggccgctgtacaaatatgtgtccggcctccggtacgggcaagatgctctcgccgatggacctcattttaaagctcagagaccatttgacggagaaaggcgctgccgtgacgtcaaaatctccgtgggtgcccgcgcccgtttttcagcacacgaaggcgaatcagctcgccgcggcttcctcagggggaggatcgcgtgaagcggcggcagccattgattacaacccgagcttaatcggcgaggtcatcacggaagaggagatttgggcatgcaccacttgccgcaactgtgaagatcaatgtccggtcatgaatgaacacgttgataaaattatcgatctgcgccgctatcttgtgcttacggaagggaagatggacagcgacgcgcagcgggccatgacaagcattgaaagacagggaaacccgtggggcttaaaccggaaagagcgggagaactggcgggagcaggctgatacagagattccgacagtgaaagaaatgaaaaaacaagacaaagagttcgactatttgttttgggtcggctcaatgggttcctacgacaacaggagccaaaagattgccgtctcatttgcaaagctgcttaatgaagcgggcgtatcctttgcgattctcggcaataaggaaaaaaactcaggcgatacgccgcgccgtttgggcaacgagtttctgttccaagagctggcggaacacaacatcggcgaatttgaaaaacacgggatcaaaaaaatcgtcacgattgatccgcacgcctataatatgttcaaaaatgaatatcctgatttcggattccgggctgaagtctatcatcatactgaattattagccgagcttgtgtcacaggggagactaaaaccgcttcacccggtgaatgaaacgattaccttccatgactcgtgctatttaggaagatacaatgaagtgtatgagccgccgagagcgatcttaaaagccattccgggcgttcaattgaaggaaatggagcgcagccgcgaaaacgggatgtgctgcggcgccgggggagggctcatgtggatggaagaagaaacgggagcgagaatcaacacggcccggactgagcaggcgctttctgtcagtccgacggtcatcagctccggatgtccttactgtctgaccatgctcggtgacggtacgaaagcgaaagaagccgaagacgcggtcggcacttatgatgtcagtgaattgctcgccatgtctgtattcggcgccgaaaaacaagagtctttatagaaagaagcgggccgccggcgcatatgccggcggctttgttttcgcacatcagccgatttatgaagggacggctctaaaatttcttaaattacgctgttaagggtagcatattctgttttaatttgtttataatgagaggtatggtttatgaacaaaacaatacaaattcgttcttattataggatagaaacagatacatataagtaatagaaagggagtgtccgaccttgagtatcaaacaatattctcaggaacagctgaagcagatggctttagttgaaatcgctcacgaaattttctcagaacataaaaaaccggttccgttccaggagctgctgaatgaaatgatctccttgctcggtgttacgaaagaggaactgggcgaccgtatcgcccaattttatacagacctgaacattgacggccgctttattgctctgtcagaccagacgtgggggcttcgcagctggtatccgtacgatcagctggacgaagaaacacagccgactgtaaaagcgaaaaagaaaaaagcgaaaaaagtcgttgaggaagatctcgaccttgatgaattcgaggaagttgatgaagatgacatcgatctcgatgaaatagaagaagatattgaccttggcgcagacagcttcgacgacgaagatatcgatgaagaagatgacgacgagcttgagatcgaagaagagatgattgaagaagatgaggaagattatgatgatgaggaagaggaacgcaaagactgattttatatcagcaaaacgatcttgactttcattgtcgaactatgtagtatgtattttgggctcttcaaaaagaagagaattcataagagtgctacgctccctttcaagaaattgaaagggagctttcttattttcatctcccaaattcttttacacatcatttgtttttagtgaaatgattttctataaaacggcacattttaaggaatgtagcgcagaccgaagagaggagcaaacgaaatgacgaaatatatttttgtaaccgggggagttgtatcatcactcggaaaaggaattgtggctgcgtcacttggccgccttttgaaaaacagaggcatgagcgtcactatccaaaaatttgacccttatatcaacgttgacccgggaacgatgagcccgtaccagcacggtgaggtattcgttaccgatgacggcgctgagactgaccttgacttagggcattatgagcgtttcattgacattaatctgaacagattcagcaacgtgacgaccggtaaaatctattccgccgtattgaaaaaagagcgccgcggggactacctcggcggaacggttcaggtcattccgcatatcacaaatgaactgaaagaccgcgtgtaccgtgcaggcaaagaaacaaacgcagatgtagtcattactgagatcggcggaacagtgggagacatcgaatcccttccgtttcttgaagccatccgtcaaatgaaaagcgacatcggccatgaaaacgtgatgtacattcactgtacgcttgttccgtacatcaaagcggcgggcgagctgaaaacaaagccgacgcagcacagcgtaaaagagctgagaagcctcggtattcagcctaatatcatcgtcgtgcgcacggaaatgccgatttctcaagacatgaaagataaaatcgcgctcttctgcgatattgacacgaaagcggtcatcgagtgcgaagatgcggacaacctttactccatcccgcttaaccttcaggagcagggactcgataagcttgtctgcgatcatatgaaattagaatgcaaagacccggatatgacggaatggaaagaccttgtcacgaaagtgaaaaacttgtctaaaaccattacaatcagcctcgtcggtaaatacgtcgagcttcaggacgcttacatttcagtcgttgaatcactgcgccacgccggctatgcgtttgacgctgatgtgaagatcaaatggattaacgccgaagaagtgacagaaagcaatattcaagagctgactagcggcacagacggaatcatcgtgcccggcggtttcggagaccgcggcgtagaagggaaaatcatcgccgccaagtatgcgcgtgagaataaaattccgttcttcggcatctgcctcggtatgcagattgcatccattgaatatgcgcgaaacgtattaggtctggaaggggctcactctgcggagatcgatccgtccactccttatccgatcatcgaccttctgccagaacaaaaagatgtcgaggatcttggaggaacgcttcgtctcggactgtacccttgtaagcttcaggaagacacgaaagccttcgaagcgtatgcggatgaagtggtatacgaacgacaccgccaccgttatgaattcaacaacgaatacagacagcaaatggaagagaacggttttgtgttctcaggaacaagccctgacggccgtcttgtggaaatcatcgagctgaaagaccatccttggtatgtcgcttgccagttccaccctgagttcaaatcaagaccgacaagacctcagcctttattcaaagactttatcggcgcttccgtacaagctgcagaacagaagtaataaaaaaagacttgcctcctttaaaagcggcaagtcttttttctgcatcaggcatattcctgcatcatttcctttaacgtaaaggacagtgcgtgatagacatacaggcctgtcattaatgaaggaaagccgtatcttgtcccgtcttcatcaggcagaagcggcatttttaatttgctgtcaatatgaacatcacaaaatgcctcaatcccggtttgatctttgatgacaggagatacgccaacgaggccgatccctttttcataaagcctttgagccagcgcctgttcttcagccgtgcccggacctgaacaaaacatcagcaccctgtcgctttctgtaatcgaatcagctgtatccggaaacgctttgacggaaggcatcggttctgagccgagttccgcctcgcacaaaatgccctgcatctcatttgcgccgtataaataaatggtatgaccgctgacggctgcctgcgccagcaggcgcgcgccgtcttcgattgcttcggattccttatcctgaatgcgggaaaaaatgcctgcaagctgcgtcgtaaatatctttaacatgagtgaaacctcctttacacatacaagaacagtatacaacaaaagagaaaatgctcagaaaatgtcggaaagtagactattataattaaaggaaatgtgaaaatcaaacagaatacataaacaactgcttccttttgacgaaaatgataatattggggtgtaaaatgatgaatgaaaagattttaatcgtagatgaccaatacggtatacgcatattgctcaatgaagtgtttcataaagaagggtaccagacgtttcaggccgccaacggcatacaggcgctggacatcgtaacgaaagaacggcccgatctcgtgcttttagatatgaaaatccccggcatggacggaatcgaaattctcaagcgcatgaagatgattgacgaatccatccgcgtcattatcatgaccgcttacggagaactcgatatgattaaggaatcaaaagagctcggagcgctgacccattttgcgaaaccttttgacattgatgagatcagagacgcggtgaaaaaatatttacctctaaaatcgaattaataaaattagaaacaattatgtcattgtgttgccgatttgtcgaaaagttggtatcctagagatggagaaaaagcgatctgttgttttacatatgacaggtttttatggtcatgctataggtggaaagcttttttcgagaagaagcaaatcaggctacataaggaggactttcgacatgcctttagtttcaatgacggaaatgttgaatacagctaaagaaaaaggatatgctgttggacaatttaacttaaataaccttgagttcactcaagctattttacaagcagcagaagaggaaaaatccccggttattcttggtgtttcagaaggcgcgggacgctacatgggcggcttcaaaacagtggttgccatggttaaagctcttatggaagaatacaaagtgacagttcctgtcgccattcacttagaccacggttcaagctttgaatcttgtgcgaaagcgattcatgcaggtttcacttctgtaatgatcgacgcatctcaccacccgtttgaggaaaacgtagcaactacagctaaagtggttgagcttgctcatttccacggcgtttcagttgaagctgagcttggaactgtaggcggacaggaagatgacgtgatcgctgaaggcgtaatctatgctgaccctaaagagtgtcaagaacttgtagagcgcactggcatcgactgccttgcacctgcactgggttctgttcacggcccttacaaaggcgaaccgaacctcggtttcaaagaaatggaagatatcggcaaatcaaccggccttccgttagtacttcacggcggtacaggaattccgactgccgacattaaaaaatcaatctcacttggtacggctaaaatcaacgtaaacactgaaaaccaaatttcttctgcaaaagctgtccgcgaaacattggcagctaagccgaacgaatacgatcctcgtaaatatcttggacctgctcgtgaagcgatcaaagaaacggttatcggcaaaatgcgtgagttcggttcttcaaaccaagcttaatccaatgtaacatccataaaccgcctgacagcattgacaggcggttttatgtcttacctttagaaagcgcaatcatgttttacagttctgaaaatttattactggggaggctttccttatgttatttttcattgatacagcaaacattgacgagattaaagaagcttatgaacttggcgttcttgccggagttacgacaaaccctagtttagtggcgaaagaagctgacgtgtctttccatgacagacttcgtgagattacggaagtcgtgagcggatcagtaagcgcggaagtcatttccctgaatgctgaagagatgattgaagaaggtaaagaacttgcgaaaatcgcaccgaatatcacggtgaaaatcccgatgacgtctgaagggttaaaagccgtaaaagcgctgagcgacctgaacattaaaacaaacgtaacgctcatcttcagtgccaaccaggcgcttttggcggcaagagccggagcgacttatgtatctccgttcttaggccgtctggatgatatcggccataacggtcttgaactgatttcagaaataagacagatttttgacattcatgatattgatacacaaatcatcgcagcttccatccgtcatgcgcagcacgtgactgaagccgctttacgcggtgcgcatatcggtacgatgccgcttaaagtcattcaccagctggcgaaacatccgttaacggataaaggcatcgagcaattcttggcagactggaataaataagggtgaaaagggcggcaaaccggttgcatccgtttgccgcacccttatgttttcctgtttggcagcgggccttcagtatcaaagtgaagagtgtgtttccccggaatgtgaacccggcgggcctctgtgcatcctgtgttaaaaatgccccgcaaagcttcgctattttcttcctgttattttataatgtccttgtattctttctcttcgaattggctacattttggacaagagctttatttgcagagacagaataaaatgccattttatttacgctccgcagctatcttcttatggaaggagactatcatggaaaagttgaatattgccggcggcgatccgttaaacggaaccgtacatatcagcggtgcgaaaaacagcgccgtcgcattgatacccgcaaccattctggcaaattccgaagtaacgatcgaagggcttccggagatctcagatattgaaacgctgcgtgacctgctgaaagaaatcggcggaaacgtccattttgaaaaaggagaaatggtcgtcgacccttccccgatgatcagcatgccgcttcccaacggcaaagtgaaaaaactccgcgcttcctattacttaatgggcgcgatgctgggccgcttcaaacaggcggtcatcggactgccgggcggatgccatctcgggccgcggccgattgaccagcacatcaaagggtttgaagcgcttggggcggaagtcaccaatgaacaaggcgcgatttatctgcgcgccgaaaggctgagaggcgcacggatttatttagatgtcgtcagcgtcggagcgacgatcaatatcatgcttgccgctgtactggctgaaggtaaaaccgtgatagaaaacgccgccaaggaacctgagattattgatgttgccacattgctcaccagcatgggcgcaaagatcaaaggcgcgggaaccaatgtaatcagaatcgacggcgtaaaagagctgcacggatgcaggcatacgatcattccggacagaattgaggcgggcacctttatgatcgccggcgccgcgatggggaaagaagtcattattgataatgtcataccgactcacctggagtcattaacggcgaagctcagggaaatgggttttcacattgagacgagtgacgatcagcttcttatgctcggcgggcagaagcagataaaaccgatcgacgtaaaaacgcttgtttacccgggattcccgactgatcttcagcagccgatgacatctctgttaacgagagccagcggcacgagcgtcgtaaccgacaccatctactcggcccgatttaaacatatagatgagctgagacggatgggggccaacatgaaagtggaaggcaggtcggccattatcaccggtccggccgagcttcagggcgcaaaagtaaaggcgagcgatctgcgtgcaggcgcttgtctggtcgtcgccgggctcatggctgacggcgtaaccgaaataaccggtcttgagcatttagaccgcggctacagcaatcttgagaaaaaactcgaaggtctgggcgccacaatctggcggcaaaggctgacggacgaagagatagaacagctccaaaattcatagaaatgcggacttttgagaggagatcgtgttgaaatggaaagaagcttatcgatggaattggttcgagtcactgaagcggcggctttagcatctgccagatggatgggccgcgggaaaaaagatgaagctgatgatgcggcgacaagcgcaatgcgtgacgtgtttgacacggtgccgatgaaaggcacggtcgtgatcggggaaggcgagatggatgaagcgccgatgctttacatcggcgaaaagctcggaaacggatacggcccgcgcgtcgatgtcgccgtcgatcctcttgaaggcacaaacatcgtagcgagcggcggctggaatgcgctgacggtgatcgcggtcgccgaccatggaacactgctgaacgccccggatatgtatatggaaaaaatcgcggtcggtcctgaagcggtaggctgcatcgatatcgaagcgcctgtcattgataacttaaaagccgttgcgaaagcgaaaaacaaagacattgaagatgtcgtggcaaccattttaaatcgtgacagacacgaaaaaatcatctctgaattgcgtgaggcgggcgccagaatcaaactgatcaacgacggtgatgtcgcgggcgccatcaatacggcctttgaccatacgggagtagacattctcttcggttcaggcggggctcctgaaggcgtgctgtctgccgttgcgttaaaagcgctcggcggcgaaatcatcggcaggcttctgccgcaaagtgcggaagagcaggtccgctgtgagcgaatgggccttgatgtatccaaagtgctccggatggaggaccttgtgagaggggatgacgccatttttgccgcaacaggcgtcacggacggagagctgctgaaaggcgttcagttcaaaggctccgtcggtacgactgaaagtctggtcatccgtgcgaaatcaggaacggtccgattcgttgacggaagacacagcctgaagaaaaaaccaaatcttgtgatccggccataaatagagaaaagcgggacggaaagtcccgcttttcttttgcaataaagagtcaaccctatcatttatatgtcaaagcattatttaagttgaataattttttgaaatgaggtaaaaataaagagtgctgcgatttttctgtgtcattccttcttttgagtactgggaaattttcaaattctaccgcatacagacgatataaatattgatcttctcaagtttttgtcctcgcttccttcaaaactcattaagacattccttttttaaaaaaagcgccgatcatgggtggaagtgttaccgatagaagttccttaacgttttataaaagaatgtgctttggcggaatcatgcgaagcagccgatttgaatgaaaacagcaatacattgactatgaaaagcgtggtgtttttatgaaagacgtatctatttcctctttggaaaatatgaaattaaaagaactatatgaactggccagacattataaaatctcctactacagcaaactgactaaaaaagaattaatctttgccattctgaaagccaacgccgagcaggaggatcttctgtttatggaaggcgtgctcgaaatcatccaatcggaaggattcggcttcctcagaccgattaattactcgccaagctcagaagacatctacatttctgcttcccagatccgccgctttgatttaagaaacggtgacaaagtatccggcaaggtgcgtccgccgaaagaaaacgaacgctattacggacttttgcacgttgaagcggtaaacggagatgatccggaatctgcgaaagagcgcgtccattttcctgcgctgactccgctttatccggaccgccaaatggtgcttgagacgaaaccgaattatctctcaacaagaattctcgatatgatggctcccgtcggtttcggccagcgcggtctgatcgtggcgccgccgaaagccggtaaaaccatgctgttgaaagaaatcgctaacagcattacgacaaatcagcctgacgctgaattgatcgttctcttaattgatgaaagaccggaagaagtaacggatattgaacgttccgtagcgggcgatgtcgtcagctccacgttcgatgaagtgccggaaaatcacattaaggtagcggagcttgtgcttgaacgggcgatgcgtctcgttgaacacaaaaaagacgttatcattctgatggacagcattacccgcctggcacgggcctacaacctcgttatcccgccaagcggacgtacgctttccggcgggattgacccggctgcgttccatcgtccgaagcgctttttcggtgccgcgcgaaacattgaagagggcggcagcctgaccattttggcgacggcgctcgtagacacgggctcccggatggatgacgtcatctatgaagagtttaaaggaacgggcaacatggagcttcaccttgaccgttctcttgcggaaagacggattttcccggcgatcgatatccgccgctccggcacacggaaggaagagctgctcgtgccgaaagagcatcttgaccgtctatgggcgatccgcaaatcgatgtctgattctccggacttcgcagagaagtttatgagaaaaatgaaaaaaacaaaaacgaatcaggaattcttcgatttgatcaaccaagaatggaagcaggcaaacctttcatcatcagcccgccgctgataaaaaatgtatttgcaaatgcagtaaatgactgatataattctctcatatgcgttccggattactccggaataataactctgtttccacacgggattcagggcggaaggagatggatacaatgaaagcaggaattcatcctaatttcaaaaaagcaacagttaaatgcgcttgcggaaatgaatttgaaacaggctcagtaaaagaagaggtacgcgttgagatttgctctgaatgccacccattctacactggacgtcaaaaattcgcttctgctgatggtcgtgttgatcgctttaacaaaaaatacggtcttaagtaataatagattttacaggcaggcaagaattgcttcttgcctgttttttatgtccataaacaggaaaaaaaggggagcggatagcctatgtacataatgaagcaaagcggatggcttgagctgatatgcggcagcatgttctctgggaaatcagaagagctgatccgcagagtgaaaagagcgacatatgcgaagcaggaggttaaggtattcaaacctgccattgataatcgctacagtgaggaggctgtcgtttctcacaacggcacatccatgacaagccacgtcatctcgtcttcggctgaaatatgggatcatatcagtgaaagcacggacgtcatcgcggtagatgaagtgcagtttttcggcgaatcgatcatcggcgacttatcctcgcttgcggataaaggctatcgtgtcatcgcggccggacttgatatggattttcggggagagccgttcggcgtggtgccgaatctgatggcggttgccgaatcggtgacgaagctgcaggcggtctgctccgtttgcgggtcgccggcaagccgtacgcagcgtttgattgacgggaagcccgcttcctatgatgatccggtcattttagtcggcgcgtcggagtcatacgaagcgagatgcaggcatcatcacgaagtgccgaaaaaaacagactgataaataacccttttcatgaaaacatcggtaaaaaatccggtgtttttttgacgttttttcaaaaaatgtagttaaataacttaaaaaagagtatgaaaaaattaagtaattttcatctcttgaattttcatttttacaggcataaaatgactaagtaatgtaaatagttatgagacattgttcgaataattgtcaaaaaaagatatagcagatcgcgatcacactagccaaaatgggtaattacttaactttgttaactatttgaagaaagaaggagattttcttgaataatattaaagtaacgaaggaaggcaacttagaaactactttaagaggaaaagaagttctatctatccctactttaaataaaggtgttgcgttttcagcagaagaaagaaaaagccttggattagacgggctgcttcctccgacaattctgtctcttgatgagcaggcaaaacgcgcatacgagcagtttcaagctcagccggaccgccttcgccaaaacgtgtatttgaatgatttgcaaaaccgtaacgaagttcttttctttaaattgcttcaaaaccatcttcgtgaaatgctgccggttgtttacacaccgactgtcggtgaagcgattcaagaatacagccatgagtacagaagacctcaaggaatttacctttctatcgacaacgtggaaggaatcgaagaggcatttgaaaaccttcatgccactgccggagatattgatctgatcgttgcgacagactcagaaagcatcctcggaatcggtgactggggtgtaggcggtatcaacatcgccatcggtaaattagcggtatacacagctgctgccggtattgacccaagccgcgttattcctgtcgttcttgacgtcggtacgaacaatgaaaaacttctgaacgatcctttatacatcggtaaccgccatgaacgtatccaaggcgaacgttacgaagctttcgttgacgcttatgtaaaagctgcgcttaaatatttccctaaagctcttcttcactgggaagatcttggaaacaaaaacgcgcgcaatatcatgaagaaatacaaccatgaaattcttacattcaacgatgacattcaaggaacaggcgcgattacgcttgcaggtgtgcttgcggctatgaagaaaacaggcgcgtctattaaagaccagcgtgtggttgtcttcggtgcaggatctgccggaatcggaatcgctgaccaaatccgcgacactatggtgcttgccggtctttctgaagaagaagccaacaaagcgttctacacaatggactacagaggcttgttaattgaaggtatggaaaacattcttgatttccaagagccgtacctgcgcacagctgaagaaattaaagattggaaacgcgatgaaaacggacaaattcctttcattgaagtgatccgtcaagcgaaaccgacaatcttaatcggtacatcaggccaaagcggcgcgttcagtgaagaaatcgtcaaagaaatggcaaaacacgttgagcgtccggtcatcatgccgatgtctaacccgacaccgcttgctgaagccgttcctagcgatcttttcaaatggactgacggcaaagtgcttgtggcgacaggaagcccgtttgacaatgtagagtacaatggcgtttctcatgaaatcggacaatctaacaacgcattcgcgttccctggacttggtctcggttcaatcgttgtagaagcgaaagtgattactcctgcaatgtttgcggcaactgctgacgcaatcgcagaaagcgttgattttgaaacaccaggtgcaggccttctgccgagcatgagcgacttacaagaagtttcaattaaagttgcgatcgccgtagcggaaactgccattaaagaaggcgtggcaaaccgcattcctgaaaatgtagaacaagccgttcttgatgcaatgtggaaaccgcaatataagcaagttgtcgctaaataatttttacgattaattttacagtccgagggaaagcttttatgtaaaggctaaagtatacggacattaaggatttggaggagaatattttgagcttcttagatattttaatcctcctggcgccgatctttttcgtgatcgtgctgggatggttcgcaggtcgcttcggaagttatgacgcgaagtcagcaaaaggggtaagcaccttagttacgaagtacgcgcttccggcgcattttatcgcaagtattttaaccacttcaagaagtgcgtttttatcacaggttcctttgatggtcgctttgatcattgggattgtcggattctttatcgtcattctgttggtttgcaaatttatcttcaaatatgatttaacgaattcatctgtattttctttaaactctgcacagccgacatttgcttttatgggtattcccgtactcggaagcttattcggagcaagcgaagtagcgattcctatcgctgttacgggtatcgtggttaatgccatccttgacccgcttgcgatcattatcgctactgtcggtgagtcatctaagaaaaaagacactgaaaacgagaacttctggaaaatgactggtaagtctattcttcacggtctttccgaaccgcttgcggctgcaccgcttatcagtatcattctggtactctgcggtgtaacactccctggcttgggagaaaaaatgcttgatcagctcggaagcacaacatcaggtgttgcgctcttcgccgtcggtgtaactgtcggtatccgcaacattaagctcagtctgccggctttcggtatcgctttgttaaaagttgccgttcagcctgcgctgatgtacttgatcgctcttgcagtcggacttccggctgaccagatcactaaagcggtattgctcgttgcattccctggatctgcggtagcggcgatgattgccacacgtttcgaaaaacaagaggaagaaactgcgtccgcgttcgtaatcagtgcgattttatctctcatctcactgccgatcatcattgcgctgactgcataatgaaaagctccctgtttcagggagcttttttgattagaattgaaatttaaaaggcgaaaatctcgttttttttctgggtttcttatgttctgaagaagcggctgtttctgagaggggagctgtctgggaaagttcctggatgcgggaggccaatgtctgcaattcggtattgaggtcgtcaatttcccgcctgtgctgaagaagctgataagacaccccttcatccgccttttgtttcagctggcgttcaagctcctctatccttgaaagcagatggttctcaccttgtttctctttcgtgagaatgtccagtttgcgctccagctctgccaatctttgttcagcgccgccattgattttcggacgctgcaaaatgaagcccgtccgttttttcggctgccggggcacttgaacgtccagaagggcagtgccttcagaaatttgccgtttgaccgatttcagcacatcaagatcctcaggtgtaaaggaataatgtccgagctcattcctttcagccggaagattcagctgcttgacccacctttgcaccgtttttgcggagacaccgagctctttcgcggccatgtttgtattcatgatcacatacctcctttttgctaggtattcgaccatgaggcggcgttcccttcatgttagacaaaacaagaaggaattcgccaaagaaagcggcatttcttcaaaaaacgttacgcttcatacaattcaagcggaagcttgtcgggatcgaagaaaaaggtaaaccgtttccccgtcagtggatcggttctgatcggttctgtgccgacgcccttttcctttaactccctgacggctgcttcaagatcgtttacggtgaaagcgagatgccggagacccgcggcttccggtctggtcggccgttcgggcggatcgggaaaggaaaacaattcaatcgcatacgcgccgtccagcgccagatcaagtttataagatccgcgatcctttcggtatgtttcttttataatgccgaaaccgagaatctcggtgtaaaaagctttcgacttttcataatcagagcatatgattgctatatggtggatggatttcagcatatccgtccctccttttttgcttcagtataacagaggcgaattgcttttgactggcgataagccctatactataatgagaatgttacgcacaggaaaacagaggtgaagaccgtgttagaccgtttacagtcaattgaacaacgatacgaaaaattaaatgagcttttaagtgatccggaagtggtcaacgatccgaaaaagcttagagaatattcgaaagagcaatctgatatacaagaaaccgttgaagtctatagacaatacagagacgcatcagaacagcttgccgatgcgaaagcgatgcttgaggaaaagcttgatgccgatatgagagaaatggtgaaggaagaaatctccgaactgcagggagagacggaaaccttatcagagcgtttgaaagtgctcctcatcccgaaagacccgaacgatgacaaaaacgtaatcatggagatccgcggagcagcgggaggagaagaagccgcgctgtttgcgggaaatctctacagaatgtactcccgttacgccgaaatccaaggctggaagactgaagtcatggaagcaaacgtgaccggaacgggcggttacaaagaaatcatctttatgattacgggaaaaggcgcatactccaagctgaagtatgaaaatggcgcgcaccgcgtacagcgtgttccggaaacggaatcaggcggccgtatccatacatccacggcgacggtggcgtgtcttcctgaagcggaagaagtagaagtggacatccacgaaaaagacatccgcgtcgatacattcgcatcaagcggaccgggcggacaaagcgtaaacacgacgatgtcggccgtacgcctgacgcatttaccgaccggtgtcgtcgtatcctgtcaggatgaaaaatcccagattaaaaacaaagaaaaagcgatgaaggtgctccgcgccagaatctatgacaaattccagcaggaagctcaggctgaatatgatcagactcgtaaatcagccgtcggttcaggcgaccgttccgagcgtatccgcacatacaatttcccgcaaaaccgtgtgacggatcaccgcatcggcctgacgattcaaaagctggatcaaatcctggaaggcaagcttgatgaagtggttgaagcgttaatcgtagaagaccagtcaagcaagctccagcaggcggaaaattaagatgaagaccgtttttgaagccctaagctgggcttcttcttatttaaccgaagcgggaagagaaaaaaacgcggccgagctgctgctgttaaatgataccggaatggatcggagcaaacttctcgcaagtctgcaggagcccgtcggcgaggacgagctttatcgattcagacggcacgtggagatgcataaagaaggtattccgattcaatatattatcgggaaagaacagttttacggcagggaattttttgtgaatgacgatgttctcattccgcgtccggaaacggaagaagtcgtgtttcatctgctggacagacagaagcgggtattttccggggcggaacgcctgaacgtcattgatatcggtacggggagcggagccattgcggtgacgcttgcgcttgaatgcggacattttttagtatcggcttcggatatttcaaaagaagcgctgcaggtggcggaaagaaatgcgcaaaacctcggagcggacgtgtgctttttgcagggagatctgttaactccttttatttcatcaggaaaaaaagcggatattattgtttccaatccgccgtatatttctgaagaagaaatggcagatttgtcggatatcgtccgtttccatgagccgcttcatgcacttacggacggcggtgacggtttgaagttctacaagcggtttatggaggagctgcctcttgtcatgaaagataaagcgcttgtcgtctttgaaatcggatataatcaggggaaaaccgtgaaagacctgttccgtcattcttttccgaatgcggaagtggaagtcgtacaggacatcaacggaaaagacagaaccgtatccgcggtcatcacatcatgaaaaaagcccgccggtgacgcacacggcgggcttttgttacaatggaaagaaaatgaaaggggcatccgccttgaaaaaagcgttcgccttcggatgtatactcgccgccgcagcttatgcggcggggtttgttctgccgtttggctttgacatcattttcggcgccgttacggctgttcttatcgtcacagcgaccatcgtttccgggttggccgtaagcggagcggagcagcgggccaattatcattctgaaacagaagaaggacggcacgcccgtttaaagatggctgccgttttcttttgcgccgctctcccttcagccggctgtctgctgattacgcttctgtagcctgattttgtctttgcagcaatacggaatcccatacccaatagacgacggctgttaaaaccgcaaagatataaaaggctgaattagaaaacagagattggcctgacggctgcaaaagaccgaagatgatcccgtttgcaatgaatgacacccctaaataataaagaagatacagcggataaaatcttttcggctttttattcagaaagtattgaagcggcagcgcaaaaatcaaataaggaaacaaaaaataaaacgccatcgaaatgaaagccgcgataatgaattgatgaacatacaaaatagaataaatgacagacatacatgccgccgacagcagcacggtgtaattatatttcatctgaaaacctcctatcaaaataatatcgtaccatattttgaatctgttaatgcagattatcagcttgctagatttttttcttcccgccggtttaaaccttttccgtcatgtccataatgggactagataaaaaaagcacggagaggaacggtggggaccgatgaaacagacaatgatgatctgcatatatatttttcttttattatcaggagcgcttgcgggtttgacaaaagaagaaacggcgcgggcatcagccaatgagcccgttgtcataccggatgaagcgatccggctcaggattttggccaacagtgataacgatgaggatcaaaagctcaagcgccagatcagagatgctgtaaacaagcaaatcacggactgggtgaaagatatcacttccattgaagaagcgcggcggctcattcgttcgaagcttcctgaaattaaagaaatcgtcaaacaaacaatgaaagaaaagggtgcgcatcaatccgtttcagttcaattcaataaaatctcgtttccgacaaagctctacggcaatatggtctatccggccggaaaatatgaagcgattttaattacactcggcaatggcgagggcgccaactggtggtgcgtcttgtttccgccgctgtgcttccttgatttctcaaacggcgaagcggtgaaagatcaggaagacggcggacagaagcaggaagaaacgcagaaacagactaaaaaagtgctggatgacgtaaaagcaaaggctgataaagcgaagaaagaaaataaagaagacgatgatacagaagtgaagtttttcctcgtcgattggatttcagatctattttcctgaagcaaaaggcataaatccggattcgattcatagattggaagaaagagttgatcgaaacggagggaaatatatgttttatcagctgagagtggcaagagatcaagatacggaggcgctggaggcctttttgaaaaaggctgatacggcacatgcggaaatcgatcagcagatcagccggtttatcgtgctggaagacagtgaaaaaaagattgccgcctgtctcgggatcgaaaaattcagcggcggaaaagggcttctccgttcactcgtcatgtcggacaggctgaatcaaagccatatcgttacactgtttcaaagtatggatgtgctgtgcaaaaaacatgagattcaagatgtctacttagtcgccaatcagccctcatctgctgagtttctgaatgtgatgggatttgaagcgtgcgccgatgcgcctgatgaactgtatacgtccgaacatttccgcaactcgttatgcacagaaggttcgtttttaatggtgaaaacctctgcctgatctaacttatacacaaggttatccacttattaaaaagtgttgtccacagtttgtggataacacttgttttattaaaggacatcttttatactttcaaaaggaatacacgagagaaaataaagttttaccgctttaaaataaggagtttggttatacatgaaaacaaaaagatggtttgtggattgttcgcgcgaattatccacaaccgatccccagattacacaagccgcggaattgctccggcagaatgaggttgtggcttttccgacagaaaccgtttacggactgggcgctaacgctgaaaatacggaagccgtaacgaaaatatatgaggcgaaaggaaggccgagcgataacccgctgattgtgcatatatcccatatcagccagcttgatcgttttatcagccatattcctgagacggcgaaaaagcttatggagctattctggccgggggcgctgacccttgtcctgccgtgtaagcccggcgtgctgtcaccccgtgtcaccgcgggacttgagacggtagcggtcagaatgcctgatcatccggtggcattagccctcatcagctcggccggactgccgatcgccgcgccgagcgccaatttatcaggaaaaccgagcccgacgaaggccgagcatgtagctcatgatttaaacggccgcattgccggtattgtggacggcggcgcgacgggaatcggagtggaatcaaccgttttgtcctgtacggggaaacagcccgtgctgcttcgtccgggcggcgtgacaaaagagcagattgaatctgccgccggtccggttcttgtggataaagggctgaccgaagaagatgaggttcctatttctccgggtatgaaatatacacattacgcgccttctgcgccgatggctattgccgacggcggcgcccggagaattcaagaactggcagacatatataaaagccggggaaaacgaatcggcattttgacaacagaagagaacgccgatagttaccaggctgattatatcaaggtctgcggcagacgctccgaccttgaaacagtggcatccgtcttatacgatgcgctccgcagctttgatgaagcggaagtggacatgattatttctgagtcctttccggataccggagtggggctcgccgtgatgaacaggctgatgaaagccgcaggcggcaccgttatccattaacttgttctaccccttatcggacatgcataagctaaacatgcgggcacgtccaagggggtttttatttcatgtcgaatctattcatcggggaacttgtctccttaagcatcatggcatttgctttggggacggatgccttttccgtcggactcggaatgggaatgattcagctgaagaaaaaacagatttttcatataggggttgtcatcgggctgtttcatgtcatgatgccgcttgtgggaatggcggccgggcatctgctgtccggttttttggggatgctcgccgtttacatcggcggatctcttcttttcattttaggggtgcagatgatcatcgccgcgtttaaacaatcagacgggccgctcatatctccggcaggctcgggactgttgctgtttgcggtcggtgtcagtctggacagcttttctgtcgggctcagtctcgggatgaacggctccaatccgtttttggccgttacgctgttcggggtcttcagcaccgttttaacatgggcgggccttttggcgggaagaaaggtgcagtcgtggctcggctcctacagcgaagcgcttggcggagccattttgatcggattcgggctgaaactgcttttaccgatataagatacgtaaaaaaagaaacgaagatgccgtttcttttttcttcatttataataggcagtaagaggtgacggacatgaaaataatctttgtatgtacaggcaatacgtgccgcagtcccatggctgaggctctttttaaatccattgcagaaacgaaagggctggatgtcagcgtaagctcggccggcgtattcgcgactccgcacggaaaagcgtcggtccatgccgtagaagcgctgtttgaaaaacggatcgctctcaatcacagttcatctcccttatcggaagaacatatcgagacggctgatctggtgctggcgatgacggaacagcacaaacagctgattgaaggccgatatcaaaacagtcagggcaaagtctttaccattaaagaatacgtaacgggggaaaatggcgatatctctgacccgttcggcggtccgcttgatgtttataaacagacgcgggacgaactggaggagctgctgacccttttggctgatcaattgcttgacggaaaaagcaagtaatctgtcagaaaatctgcaaacaggtcatttgcaaaacgaatgtgaaagagtagaatgaaatcaacggatttcgtaataaaaaggacaagcacactgggctgtcttcgcccagccacacctaggaggtaaatgaatgaaagtagctattgcgtcagatcacggcggcgtccatatccgcgaagaaataaaaagtcttttggatgaattgcagattgaatacattgatatgggctgtgaatgcggcgccggctctgtcgattattcagactacgcttttccggtagcggaaaaagtggtgaacggcgaagctgacaggggaattttaatttgcggcacaggcatcggcatgagcatctccgcaaataaggtaaagggcatacgctgtgcgcttgcccatgacaccttcagcgcaaaagcgacgcgtgaacacaatgacacgaatgttcttgcgatgggcgaacgcgtcatcggcccggggctggcgcgcgaaatcgcaaaagtctggctgacgactgaatttacgggcggccgccacgaacggcggatcggcaaaatcgcagattacgaagaaaaaaatctgtaagaggtgctggacaatggaagagatgaagcaaaaatggacggacatgctgactgagtttcaagaacaggcaggactgacggacggcagtctgctggtgatcgggtgcagtacaagtgaagccgccggaagccggatcggcaccgccggaagcggggattgggctgaattgatatacggcggacttaaccggtttaaggaaaaaacgggtgtgcatcttgcttttcaatgctgcgagcatttaaacagggcgcttgtcattgaagcggaaacggccgagcggttcaggctccccattgtttcagccgtccccgtcccgaaagcgggcggagcgatggcctcttatgcataccggcagatgcgttctcccgtgctcgccgaatcgattcaggctgacgccgggattgacatcggtgatacgttcatcggcatgcatctgaaacccgttgccgtccctgtccggatatcaagccgtgagcttggagaagcacatgtgacgatggcccgggcaagaccgaagctgataggcggaattcgcgctgtttatgaatgcgaatgatgaaaatacttttcctgtataatgttcgtgttttctaattaaattttgtgatttttttaaataagctgttacattcacctgaaaaaccatgtacaataagggtggtaaaaataaagaacaggaaacggataggagaggatctcgctgatgaaacatttacctgtacaagacaaacaagtgtttaacgccatcaaagatgagcgtaagcgtcaacagactaagatcgaattaattgcttctgaaaacttcgtgacggaagcggtaatggaagcacaaggctctgttttaacaaacaaatatgctgaaggctaccccggcaaacgctactacggcggctgtgagcatgttgatgtcgtcgaggacatcgcccgcgaccgcgcgaaagagattttcggagctgagcatgtaaacgttcagccgcactcaggcgctcaagcgaacatggctgtttacttcacgattttagagcacggcgacacggtgctcgggatgaacctctcccacggcggccacttaacacacggaagcccggttaatttcagcggcgttcaatacaactttgtagaatacggtgtcgataaagacacgcaatatatagattatgaagatgtgcgtgaaaaagcgttggcgcataagccgaaactcatcgttgccggagcgagcgcgtatccccgcacgatcgactttaaaaaattccgcgaaatcgctgatgaagtcggcgcttacttcatggtagacatggcgcatatcgcgggtcttgtcgcagccggtcttcatccgaatccggttccttacgctgactttgtaacgacaacgactcacaaaacacttcgcggcccccgcggaggaatgatcctttgccgtgaagagttcggcaaaaagattgataaatccattttcccgggaatccaaggcggaccgcttatgcatgtcatcgcggccaaagccgtttctttcggagaagtgcttgaagatgatttcaaaacatatgcgcaaaacgtcatctcgaacgcgaagcgcctggctgagtctctgaacaaagagggcattcagctcgtatcaggcggaacggataaccaccttgtgcttgttgacctccgttctctcggtctgaccggaaaagtcgctgaacacgttcttgatgaaatcggcattacatctaataaaaacgcgatcccttacgatccggaaaaaccgttcgtcacaagcggaatccgtcttggtacggcagctgtgacaagccgcggctttgacggtgacgcgcttgaagaagtcggcgccatcatcggcctcgcactgaaaaatcatgaagacgaagcaaaacttgaagaagcgagacagcgcgtatctgccttgactgaaaagtttcctttatataaagaactggactattaataaggaagaaacccgccggaaccttaatccggcgggtttttttatgattttcttgaaactgtttgtctttttctgtagaatcaatagaagtgtgaaaaagtcactcggacaacaaaaaaggagctgaacacagtatgggaaaggtttacgtatttgatcatcctttaatccagcataagctgacatatattcggaatgaaaatacaggcacaaaggatttcagagaccttgtggacgaagtcgcgtcactgatggcgtttgaaattacacgtgatctgcctcttaaagaagtggaagtgaaaacacctgttcaaacagcgacatccaaagtgatttcagggaagaaactcggtatcgtgccgatcctgagagcgggcctcggaatggttgacggcatgctgaaattaatcccggccgctaaagtgggacatgtcggattataccgtgatccggaaaccttaaaaccggtggaatactatgtcaagcttccttctgatgtagaagaacgcgaatttattgtcgtggatccgatgcttgctacgggaggttctgcggtggaagcgataaacagcctgaaaaagcgcggcgcgagaaacattcgttttatgtgtcttgtagcggctccggaaggcgtggaagagctgcagaaacatcactctgacgttgatatttatatcgccgcccttgatgaaaaactgaatgaaaaaggctatatcgttccgggcctcggtgacgcgggtgacagactgtacggaaccaaataaatcggaaaacctcattcatggggttttctttttttatccagatatttgctgaatgggcagacttcatacatttataggtgaatttgtgaacattctgtgtatgctttcggtataaaaagttttttaactttaaacagattgacacatgttaggggctattgtatgctaaacgagggtattatgagaaggttttcattcctttcatttctagtatccatcctcattttaaatcctccaaaaaacccgttatatgaggatttatctaagcgaatgaaacagcatcccgtggcatcaggaggatgagtggttttttcgaacaggccgttttgcgggacaaaaaaaggccttctgcaaagggttaaccgcatgttttgccgtatccaggaattatattacattttcatcaggagacagatagttgatggacgatcccaatcttacattcagcagacaacggagatatgtatttgtgatcttagcaatctatttgctgggatatggtcttacggcgtataaaactgtttttctaggcctctttttgggaactgttttcagtttgtttaatttgtggctcttgaccagaagaatgaatgcttttgacaaggccgtggcgaaaggaaagtccatacgatcactcgggagcgcagcgcgttggtgcaatgcgatacttgcgatggctgtcgcctttaaatatcccgataaagtcagtgtggcaagtgtgattattggattaatgacaatttatcccgtcattatgatagattccattattcagctcaaacgttcatcaatggaagagaggtgaaaacccattgaatcacgattacagaactatggatttgtttggtcttacttttaatctgacaaacattctgatgattactgtggcaagtgtgattgtgctgctgattgcgattctcactacgagaacgctgtccatccgtccaggaaaagcccagaacttcatggaatggattgttgattttgtccgcaatattataggcagtacaatggatttaaaaacaggggctaacttcttggcgcttggtgtaaccttgctgatgtacatatttgtatcaaatatgctggggctgccgttttctgtaacggtcggacacgagctttggtggaaatcaccgacggccgatccggctattactctgactctagccgttatggttgtgtcgttaacgcactattacggcgtgaagatgaaaggtttgaaggaatactctaaggattacctcagaccggttccgcttatgttcccgatgaagatcattgaggagtttgcgaatacgctgacactcggacttcgtctttacggtaacattttcgccggggaaattcttcttggcctgcttgcgaatctggcgacgaatttctactcaaacagcttctttctcggtttggtcggcacagtcggagccattcttccgatgcttgcatggcaggcgttcagcttgttcatcggtaccatccaggcatttatctttacgatgctgacgatggtgtacatgtcacacaaaatcagtcatgatcattaaaatcatatatccattcggataacattttaaaggaggaactttttcatgaatttaatagcagctgcaattgcaatcggtttaggtgcacttggtgcaggtattggtaacggtctgatcgtttcacgtacggtagagggaatcgcccgtcagccggaagcaggaaaagaacttagaactcttatgttcatgggtatcgcattggttgaggcccttccgattatcgctgtcgttatcgcgttcttagcgttctttggctaagcaaaaaagccttatatgaactaaaaatggcgaagatcactctaagagaaccttcgccattgctttatgtctgataagcaggccgtcccgaaacggctttttatcagcagagaaaacctgcagaagggagttgccgtagtagatgtctcaattacctcttgaattaggactgtcgtttaacggcggagatatcctattccaattgttagctatgttagttttattagcgcttctcaagaaattcgctcttggaccgctattaaatataatgaaacagcgtgaagatcatatcgccggcgaaattacgtccgctgaagaaagaaataaagaagcgcagaagctgattgaagagcagcgcgttcttttaaaagaagcgaaacaggaatcacaatcactcattgaaaatgcgaaaaaactgggtgaaaagcagaaggaagacattatccaggctgcacgcgccgagtctgaaagattgaaagaagcggcgagaaccgaaattgttaaagaaaaagaacaagcggtttccgcacttcgcgagcaagtcgcatcactttctgtcttaatcgcatcgaaagtgattgaaaaagagcttgatgaacaagcccaggaacaactgattcaggactatcttaaagaggtaggagaaagccgatgagtggatctgctgtctctaaacgatacgcgtcagcgcttttcgacattgccgttgagacttctcaaatcaatgaaatcgaagaagagcttaccgtactaaaagaagtgttccggaacgaagccggattacaggaagtgttaagccatccgaaggtatcggccgctaagaaaaaagagctgattcagcaatcgttcggcgcactgtctgagtctgtgctgcatacgatttttcttctgattgaccgccgccggtcttcgattgtgcctgatctcacagacgagtttatcaaacttgccaatcaggcccgtcagacagaggacgcggttgtttattcagtaaaaccgctgtcagaagcggaaatgttatcattgtctcaagtgtttgcaaaaaaagccggaatcgcttcgctcagaatcagaaatgaagtgcagacggatttaataggcggcattaaagtccgcattggaaaccggatatatgacggaagcgtaagcggaaagcttgagcgcatggaacgtcaacttgccggaggaaatcgatagaaggggtgaaacctaagtgagcatcaaagctgaagagattagcacgctgataaagcagcaaattcaaaattaccaatctgaaattgaagttcatgacgtaggtacagtcatccaagtcggagacggtattgcgcgtgtgcacggccttgacaattgtatggccggtgaacttgttgagttttcaaacggcgttttgggtatggctcaaaaccttgaagaatccaacgtaggtatcgttatcttaggaccttacagagatatccgtgaaggtgatgaggtcaaaagaacgggccgcatcatggaagttcctgtaggtgaagaattaatcggacgtatcgtcaacccgctcggacagccggtagacggactgggtccgattctgacaagcaaaacacgtccgatcgaaagccaggctccaggcgtaatggaccgtaaatcggtacatgagccgctgcaaacgggtatcaaagcgattgacgcgttaattccgatcggccgcggacagcgtgagctgattatcggtgaccgtcagacaggtaaaacatctgttgcgattgatacaatcttaaaccaaaaagatcaagacatgatctgtgtgtacgtagcgatcggtcaaaaagaatctacagtacgcggcgtggtggaaacacttcgtaagcacggcgcgcttgattacacgattgtcgtgacggcgtccgcttcacagccggctccgcttctgtaccttgcaccgtatgcaggggtgacaatgggtgaagaattcatgtacaacggcaagcacgttctcgtcgtatatgatgatttatccaaacaagcggccgcttaccgtgagctgtcattgcttcttcgccgtccgccgggccgtgaagcattccctggggatgtattctatcttcactcccgtctgcttgagcgcgcagccaagctgagtgacgcaaaaggcgcaggatcaattacggcgctgccgttcgtcgaaacacaagcaggagatatctccgcttatatcccgacaaacgtcatttccattactgacggacagattttccttcaatccgacctattcttctcaggcgtgcgtcctgcgatcaatgccggattatccgtatcccgtgtcggcggatcagcccaaatcaaagcgatgaaaaaggtagctggaacattgcgtcttgacctggcttcataccgtgaacttgaagcgttcgcccaattcggatctgatcttgaccaggcgactcaggcgaaactgaaccgcggtgcgcgtacagttgaagtgctgaagcaagacttgaataaaccgcttccggttgaaaaacaggtagccattctttatgcgctgacaaaaggatatcttgatgatattccggttgcggatatcagacgttttgaagaagagtactacatgtaccttgatcaaaaccataaagatctgcttgacggcattgcgaaaacaggaaaccttcctgctgatgaagacttcaaagctgcaatcgaaggcttcaaacgcacatttgcaccaagcaactaacccttagaagatgagagaaaaaggttctctttttctctctttttacgcaaatgaagaataaaggtggtgaaatctttggcctcattacgcgatattaagtcaaggatcacgtcaacgaaaaaaacaagccagattacaaaagccatgcagatggtatccgctgcgaagctgaaccgtgcggaaaccaacgcgaagtcatttgctccgtatatggataagatccaggaggttgtgtttaacgtcggaaaaggcgcgaaaaacgcgaaacacccgatgcttgtctcaagagaagtgaaaaagacggcgtatctcgtcattacgtctgaccgcgggcttgcgggtgcgtttaacagttcggttttgcgaaacgcttaccgcaccattcaagaacgccatcagtctaaagatgaatacacggtgattgcaatcggcagagtcggccgcgatttcttcaaaaaacgggagatgccgattttgtctgagttagtggggcttggcgacgaggtcacttttgctcagattaaagatttgacccgtcagacggttcaaatgtttatcgacggcgcttttgatgaactgcatttggtgtataaccatttcgtcagtgcgatttcacaggaagtgacggagaaaaaagtgctgcctttaacggatttcggaacgagcggcgggaagcgcacggcttcttacgagttcgaaccggatgaagaagaggtgctcgaagtgctgcttcctcaatatgcggaaagcttaatttacggcgcgcttcttgacagtaaagcaagtgaacacgctgcgagaatgacagcaatgaaaaatgcgacggataatgcgaaagaactcattgattcactttcgctttcatataaccgcgcgcgtcaagcggcgattacacaagaaattaccgaaattgtcggcggtgcagccgctttagaatagaaagattttgtcaggagggatagcgatgaagaaaggacgcgtaagtcaggtgcttggaccggttgtcgacgtacgtttcgaggacggccacttgcctgcgatttataatgcgattaaagtttcacagccagctacaggcgaaaatgaagtaggcatcgacctaacgctagaggttgctcttcatttaggcgatgatacagtccgtacaattgccatggcatctacggacggaattcagcgcggaatggaagctgttgatacaggtgcgccgatttccgttcctgtcggtgatgtgactctcggacgcgtatttaacgtactgggagataaaattgatttaaatgaaccgctgcctgcggatgctcaaaaggacccgatccacagatcagctccttcattcgatgagctttcaactgaggttgaaattcttgaaacgggaattaaggttgttgacctgctcgctccttacatcaagggcggtaaaatcggattgttcggcggcgccggcgtaggtaaaaccgtattaatccaggaattaatcaacaacatcgcgcaagagcacggcggtatttccgtattcgccggtgtaggagagcgtactcgtgaagggaacgaccttttctacgaaatgagcgattcaggcgttattaagaaaacagccatggtcttcggacaaatgaacgagccgccgggcgcacgtatgcgtgtagcactgacgggtcttacaatggctgagcatttccgtgataaacaaggacaggacgtactgttctttatcgataacattttccgtttcacacaagcgggttcagaggtttccgcgcttctcggccgtatgccttctgcggttggttatcagccgacgcttgcgacagaaatgggtcagcttcaagagcgtattacgtctacaaacgttggttcagttacatctatccaggcgatctacgtgcctgccgatgactacactgacccggctccggcgacaacgttcgctcacttggatgcgacgactaaccttgagcgtaaattaactgaaatgggtatctaccctgcggttgatccgctggcttccacttcccgcgcgcttgctccggaaattgtcggagaagagcattatgcggtggcgcgtgaagtccagtcaacgcttcagcgttacaaagaacttcaggatattatcgcgattctcggtatggacgaattaggtgaagaagacaagcttgtcgttcaccgcgcacgccgtatccagttcttcctttctcaaaacttccacgtagctgagcagtttacgggacaaaagggttcttacgtgcctgttaaagaaacggtacgaggctttaaagaaatcctttccggtaaatatgaccatcttccggaagatgcattccgtcttgtgggacgcattgaagaagtcattgagaatgcaaaagagatgggtgtagaagtttaatctggtcctaggagggtaaaagcatgaagaccgttaaagtcaatatcgttactcccgacggcccagtatatgatgctgatattgaaatggtaagtgtaagagccgagagcggtgatctcggtatcttgcctggccatattccgaccgtggctccgcttaaaatcggcgctgtccgccttaaaaaagacgggcagaccgaattggcggctgtcagcggcggatttttagaagtccgtcctgatcaggtcactatccttgcacaagccgctgaaacagcggaaagcattgataaagagcgcgcccttgctgcgaaaaagcgggcggaagaccgtttgaacaaacgatcagatgatactgacattcgtcgggctgagcttgcattacagcgggctgtaaacagattggatgttgcaggaaactaaaaaagaatccttctcggctgtctgagaaggattcttttctatattaacgcataagagattcatagacgccgataagcggatgatcctcttctttttgcagatataaatgttcgcagcaattgtcggtgtgccacgttttgtttcctctccgcacacccgtcgtataggcgccgtccgtatacggataaggtttgacgacccattcggcatcgtcatggtgtctgatggcgcaatcgatgacatacacactgagcattttctcaaattcgtcaatcggcaggttccaatccgccaaaagcagctcttgtatgctgcggaagtaaagagcttccacttccagcaggctgccgcgtgaataatcaagagaaatgttgaaaaactgacataattctttcagttcctctgtttgagactgtctataatcatagtagaatgctatcgcttcccactcgtggtcaaatacgggaagagtttctccatactgcttttccggatgaaaaaaggaatgattcatattcccatctcctttccaaaaaagtatatcatgccggagaacggacatttaagcggggattgcccctaattttggataaaaattctgatgtaaaaatgatcatctttctctcttcttcttatataataagagaggatatgaggggcggaaaaaatgaaaggagatgggatttgtgaatgtattggggcagcaggccgcaatcagcatcctggttcacctggtatgcattgcggtgacatggtgggcgcttcaggccgtcaactttgatccgctgatccgaaaaggaaaaatagtgcaggcgaggctgctgatcattcttcttaccattgcgatcggtacggcagtcgctgacttctttttagattatcttacctattcgaaacagcttccatacttattttaagatgtttcgtctgttgaaatgaagggaatcgctgggtgagacaccaatttttcttcacccgcttggcgagttttgacgaagttttccatgtattgctttccccggctccggtaaaaatgggagtaagggggagagatcgatatgaagaaaaaaagagcaggccgcatcatcttgttttttgtttttttaagcgccttaatagcggtatttcattccattcatgcaagtgagctgtctccgcttgcccagattgccgaaggaatggagcggcagcaggtcactgtagatgaatggacgcttcatgcgaaaaaaaatctgaacctgtcactgagtgaatttgatgacaaggtaaaagaactgaagacgcagtatccgcaatatcattgggaatccgcgcgggaagataaaatcgtaaaggccgtcggcacgtattctgacaaaaaaaatcacacaacttttaaactgcagctcgtcactaccctcaaaaaccagaacccaacttcgtatttattatatgagcaaatgagcccggagcaaccgaaaaactggaatgatacatatgaacagtttgaacggcaggcacacgacatatttcaaaataaagtatttatttttacttgtctaaagggtcatttaaatgataatatgagtattgttttgcaaaaaaaagcagaacagctcatgaaagaatttgaagcaagtccagttgaacatgtagttgagcctcatttcgtttctgtttctgcatttacatataagtggacagattacatcatgacatcgaaacataagatgaatgtgcaagttgcgcttagaagtgcgggaatgggcgaaaaacataccgttacggttggcacaccaatcgtgacgactgaatattaatatagagaatatagggacgcggaggggaataccttggaaaaaatcatcgtccgcggcggtcagaagttaaacggcacagtgaaagttgaaggagcaaaaaatgccgttttaccagttatcgctgcatctttattagcaagtgaagaaaaaagcgtaatatgtgatgtacctacgctctccgatgtatatacaattaatgaagtgttgcgtcatttaggagcagatgtgcattttgagaataatgaagttaccgtaaacgcttcttacgctttagaaacagaagcaccttttgaatatgtgcgcaaaatgcgcgcgtcagtgcttgttatgggccctctgttagcccgtacgggtcattcaagagtagcgcttccgggcggctgcgcaatcggctcaagaccgattgatcagcatttaaaaggctttgaagcaatgggtgcaaaaatcaaagtaggcaacggctttattgaagcagaagtggaaggccgtctgcagggcgcaaaaatctatttagatttcccaagtgtgggtgcgacagaaaacttgattatggcagctgctttagctgaaggaacaacaacgcttgaaaacgtggcaaaagagcctgaaatcgttgacttagcgaactatatcaatgcgatgggcggaaaaatccgcggagccggcacaggcaccattaaaattgaaggtgtcgagaagcttcacggcgtaagacacaacatcattcctgaccgtattgaagcgggtactttcatggtggctgcggcgatcacggaaggaaatgtattagtcaaaggtgcggttcctgagcatcttacgtctttaattgcgaagatggaagaaatgggagtcaaaattacggatgaaggagaaggccttcgtgtcatcggtcctgcccagctgaagccgatcgacattaaaacgatgcctcacccaggattcccgactgatatgcagtcgcaaatgatggcgctccttctccgtgcgagcggaacaagcatgattactgaaactgtgtttgaaaaccgttttatgcatgctgaagaattccgccggatgaatggcgacattaaaattgaaggacgttctgtgatcattaacggtcctgtacagctgcaaggcgcagaagttgccgctacggacctgcgtgcgggcgcggcgctgattcttgcgggattagtggctgaaggtcatacacgtgtcacggaactgaagcacttggatcgcggttatgtgaatttccatcaaaaacttgcggctctcggcgctgacatcgagcgtgtcgttgatgaaacggccgctgaacaagaaagcaaagaagtcgtaactgacctaaacgcataatggctgtaaaaacagtatgtcaatctggcatactgtttttttatggtttatcatcattattatgctctgatttccaaaaaagaatacgtttttcgcgtgaaaaatggaataaagattctgtccaaaaggaagtcatattagcttgtccctgcccataagatgaagtagagtcgaatcccaagcaggaggcagctgatatatgaaaccgattgtatttctactatccgggctgtgtatacttattcttcttgtccccaccattctcgtccttccgtttcaggcagaaaaaggagcagccgtaaacagagagcccggacacaaaacagcacacaccacacgagaaacaaaaggagcagaaacattgaaagaatcacctgtatccattccggtttatcggacatccaatcattctgtagagaacattccgcttgaagagtacgtggtcggtgtcgtggcttccgaaatgcccgcaaactttaaaccggaggccttaaaagcccaggcgctcgccgcccggacattcatcgtcagactgatggtcgctgattcagccgttcaggcgccgaaaggatcactggtggatgatacgcaaatgttccaagtctatcaaagcaaaagccagctgaaaaaagaatggggttctaagtacgcacacaacctcaagaaaatcacaaacgcggtggccggcacgcaaggaaagattttaacgtacgacaacaagccgattgaggcatctttcttctctacgagcaacgggtatacggaaaatgcggaagcctattggacaagcgccattccttatttaaagagcgtgaaaagtccgtgggataagcaatcgccgaaatatctcgccacccagaccttcagtgtgccggagtttcagcaaaaacttggcgtacagctctcgggacaaaacacggtgggacagattacagccagaacgccgggccatcaagtggcgacggccgttatcaacggcaaaaagctgaagggaagagacatccgggaaaaactcggactccgttctgccgactttgaatggaaacggaacggcggcagcatcaccattacgacaaaaggattcggccacggcgtcggcatgagccagtacggggccaattacatggcggagcagggaaaatcagtggcggacatcgtcaagcattattatcagggagtggacatttccgaagcagattcatttttaaacaaatatatggcgaaaaaatagacgctttcatgagcgtctgttttttttgaaaactattccataaacggtaaagcaaccaacagactcatataacgaaagcctaaaggctgacaaatgtcgattgaaggctgagcgccgggtgtaaatcactgataaaaatgccgcttctatgtgaatatacgcaaaaataatgaggaacgccgtcctatttatttcccttttcatctcatttacgataaatattgttcggcgttgaacgtaaatctattgaaaaggggaaaaagcaatgaaaaaaacattttcactcatactcatgctcggattgatgctgactgctgcatctcctgcttttgctgccgagaatgcaaacgagaagactctttcatttaaaaacaataccgccattttacttgatgcgagcggcagtatggcaaaacggattgacggtgtttctaaatacaacatggcaaaagaagaaattgtccgttttgcggatcaaattaaatctaaatcacaggtcagaatgacggttttcggttcggaaggcaataataaaaactccggaaaggttcaatcttgtgaatccattcgcggtgtgtacggattccaaaggtttgacagacagagcttccttaactctcttaacggaatcgggcctacgggctggacaccgattgcaaaagcattagaggatgcgaaggcttcctttaccggtttgcacaaacttggcagtaaatccgttttcctgttgacggacggcgaggagacatgcggaggagatcctgttaagacagcgaaagaacttcgcaaacagcatattaaagtcaacgtgatcggctttgactttaaggaaggcttcaacggccagcttcacgagattgccaaagcgggcggaggaaaatattacgaagctcacagccaaaaggatatgaaccgcatctttacaatggcagcgagttcattagcggaataagaaaaggtgccgtttatcggcccttttttttatttttatttaacaaaaatttcaagaaaagatgaagagaaaactgtaaaaagaatcagattccggacttatattacaaaaagggcgaaaaaggcattaaatctgtcatcatttatccaatctttttaggatgatgcgcataattctgttcatttttaacggcgtacagccgcttatacaaaaggaatcctgccctatatctttttgcatactcgtcatctagcatagagaagagccgggggcccatcggccaaaaacaaacggagaggaatgaaggaaatgaaaaaaatgttcactgcggggattgtcggacttttgacgctttcactcggatcacctgtttttgcagctgagaaaaagcacgaagaaacaaacgttgccgtgctgtttgacgcaagcggaagcatgattcaaaaaacagggggagagcgtaaaatagatgtcgcgaaagagtctgtcacttcttttgcggaagttcttcctgaagacacgaatctgatgcttcgggtattcgggcataagggcaataataaaaactcaagcaaagccgtatcatgtaatgcgacagaaacgttatacggccttcagccgtacgccgtgactccatttgagcaatcactcagcaagattaaaccgaccggctggacaccgattgcgaaagcgctctctgatacgcgtgaagaatttgagcgggccggcgccacggggaaaaacgtcgtatatctgatcacagacggtgaagaaacatgcggcggtaatcctcaggccgaaattcaaaagctccgtaaagcgaacgtcaacacgatcgtcaatatcatcggcttcaacttcggcatgaaaggaagcgaaagccttgaaaaagcggcggaagcgggaggcggcacatatgtctcagctgacagcgcggacgagttcaaacaggcttgggaagacgctgcaaaggatttagcaaaagaataggttaaaaaaggacgcccgcgcggcgtcttttttgtttagaaaacggaaccgcgggaatgatacggataaaaggagatgaacgctgttgttaaaaggagcaggcattatattagtgctggcggcagtcgtttttgttctgatcggaatttttctgaagcttgccgccttcatattcgtcagtatattggccattatcgccgcagttattttattcaccattctgagcagacatcatcgcaatgaaacatagagtcctaagagggctctttttttaaaccgcaaattcgacaaaatacagggattgtggaagaataaaagagaaggatactgcggaggggaaaacagtggataaaagaacaacagcggtaagggacatataccgctatgaaaaaggggtattaacaaagacggcggatcggatggtttcagagtatccgctgaccgtcatggtgaacggacaggaatttgttacgctcgtctgcacgcctgaccatttagaggaactcgtcatcggatttctcgcatcagaaggcgtcattcgttttgaaaaagaaatcaaaagctttactatagatgaaagtctcggatttgcatatgttgaactgacaaatcccggggtgcttgagcaaaaagactatacgaagagggtcatcggttcatgctgcgggaaaggccgccatttttactttcagcaggatgcgaaaacggccaaaaccgctgtcagccgtatcaccataactcctgagacgtgccttcgtctgatgaaggagatgcaaagcggaagcggcaccttccgggaaacgggcggcgtccataatgcggcgctgtgcgatacggaaaagctgctctttatgaggacggacatcgggcgccacaacgcgctggataagctgtacggctgctgtttgaaaaacggaatgccggtccgtgacaagctgatcgtcttcagcggccggatttcctcggaggttttattaaaagccgcaaaaatcggcgtgtcgattgtcatttcaaaatcggcgccgacggagctcgcgctgcaaatggcggaagagctgaacataaccgcgataggttttgtcagaaacggatcttttaacgtatacacacatcctgaacgggttgaacaatagaaaggggtcttgggcttatgaatacagaaacgcgccgggtgacagacaaaagggaaaggccgctcagggatcttcgtatctctgtaaccgaccgctgcaacttcagatgcacgtactgtatgccagccgaattattcggaccggattatccatttttacaaaagacggaattgctctccttcgaggagcttgagcggcttgcgaagctgtttgtcggccgcttcggcgttgaaaaaatcaggctgacgggcggagagccgctcatgagaaaagatatgcctgaattgatcaaaaaacttgcgcgcatccccggacttaaagatatcgcgatgacgacaaacggctctctgctgcccgtgtatgcggaaaaactgaagcaggcggggctgcatcgcgtgacagtcagcctcgattctttagaggatgagcggtttaaggccattaacggccgcggggtttcggtgaacaaggtgcttgagggcattgaggcggcaaaagcggccggactcggtgtgaaaatcaatatggttgttcaaaagggcgtcaatgaaaaagatatcctgccgatggcccgctattttaaagaaaagggtcatattctccggtttattgaatttatggatgtaggcaatacgaatcaatggaataaaaaagacgtgatcacgaaggccgagattattgatctgatcaatcagcatatgccgacggagccgatagaagcgaattataaaggagaggtcgcttccaggttccgctatcttgacggttccggcgaaatcggcgtgatttcctccgtctcggatgcattctgcgcctcctgcaacagagcgcgcctgtcggcgagaggcgagctgtttacgtgcctgtttgcgtcaagcggctatgatgttcggaaactcgtgcgcggaggtctgaccgatgacgaattgacggaatccatcgcttctgtctggaaaaatcgcacggatcagtattcaattgaccgcgcgctttctaaaacggatgggaaaaaaaaagtggaaatgtcttatataggcggatgaagaaaagcttgcccggacaagggcaggcttttttattcacaatatgagagcggtctgttcaaaaaataccgatgacagccgaaatatatgataggaattttgatgcaggacaatcaagttatgcaattccaaagccatacaatatgttaaaatataaccaatagaaattagaaaaggttgtgaaaggggcatgaccgcatacgagattccgtcatctcaagttggagttaagatcaacaaatggtacaagcacattttagcgtttcaagcggctgatgccataaagctgaaagaggaaattgatgaggatatacaacgtatggaggaagaccagctgctgctgttatattatcagctgatcagctaccgccatcatattatgcttgattacgtcaagccggaatgcaccgaacaatcacagattcagtacagcgagctgcaaaagacgatcgaaagcacggacagcatatcgggactgtctgagtattatttccatttgttcagagggatgtatgaattcgatcacaataactatgttgcggctatttctttttaccggaaagcggaaaaactcctttcatttgtcgaggatgatatagagagggcggaattccatttcaagatgtctgaagtgttttatgtcatgaagcagactcatttttccatgaatcacgggattcaggcgctggatacgtatatgaaacacgatttctacagagtgcggagaattcaatgccatttcgtcatctcaggaaactacatcgactgcaaaaactacgacaaagcgcttgagcatttagacgaagccctccgcctttctttgcttgaaggacagccccgcctgatcgggtcttcgctttacaatctggggaattgttattctgaaaagcgcgatctggatgaagcggcccggtactttagaaaagcggttcccgtttttgaagagcatcagcttgaacagcttccgaaggcgctgttcagcttaacgcacacccttttcaggctgcatgatgaccaagcggcccttacctattatgaaagaggggtcatgatcgcgaaagaacggggcgaccgattcagtttagagaagtataagtttttacaagcgctttatttggagtcactcaatatggatttaatccatgaagtgtttgactatatgaatgaaaaatcgctgtatgtgtatattgaagatttcgccttggaggccgccgtttacacaagcgcacatgagcaatataaagaagcggcgtatttttatgaaaaagcgattcgcatgagagaaaacattcaaaaagaacagtgtttatacgatatataattttcttaaccatctgctcagcagatggttatttttttatgcacatcataacgtttgaccatagaaaaaaacggaaaaatcgcaaaagagagaaaaaagtacgatgggaaggagggatttgttgttcggattcaatgatatgataaagttttttgtatcatttctcatcattctgccgatggtgtctgtcatccatgtggcgggacacagctttatggccatgctgttcggaggcaaggcatcattggatatcggaatggggaaacgtcttttaaaagtagggccgattcgggttcggcgtatctacttcatagattctttctgcaagttcggcgaattgcggatagataaccgtctgacgagcgcgctcgtctattccggaggctgtctgtttaatctcgcttctatctttttaataaatctgctgatcataaaagatgtccttgagccaaacttatttttttaccaatttgtctatttttcaacttattatgttttctttgctcttctgccggtgcaatacggggataataagctgtcagacggattggctgtttacaaagtgctccgctacggggaacgctgtgaaatcaataattgagagtttacatgtttgtgatcgggctgaaagggaagaaaacaaatacacagaacaaaaaaggagctgaagagatcatgagtgaagataacggtttaaaagacaaagtaaaaggcggcatgaacaaaatgaaaggggaagcaaaggacaaagcaggcgacatggcaaacaagtccgacttaaaagcggaaggtaaaaaagacaaagcgaaaggcagcctgcaaaagggtgtcggcaaaacgaaagataaactcagtgatgattaatttgatagtgaaacacagcaaaagcccaaaatattttgggctttttgttatgagaaatgacaaaaattccagttcatttggttaatattcactaaatttttaaatattctataaattccccggcaatttctttataatattcacatagaatgtaacctttcttcacatttgattaaacgtttgttgaagaaaaaaatgagaaatcggtaaattctgcaaaaggaatcgggccgttcaccgtcgaataacttttatcacttaacatttcatgaggtgaagggggtgacggccgcctgcatcgtttcggtatgaccatgcggattgtgtttgactatcactaagggggaatacagatgaaactgacaccggttgaacaagaaaaattgcttatttttacggcaggagagctcgctaagcagcggaaggcgcgcggcgttctgctgaattacccagaagccgccgcatatttgacctgttatctgatggaaggcgcgagagacggaaaaagcgttgctgagctgatggaatccggccgcaatgtattgacggaaaaagacgtcatggaaggcgttgcggaaatgctggacagcattcaggtggaagcgacgttcccggacggggttaagcttgtcaccgttcatcagccgatcaaagcggaggtgaagtcatgaagccgggagcgattcaagtcgcaaaggggaccatcaccattaacgaaggccggaagacgctggaggtgtcagtcaccaataacggaacacggtcagtgcaggtaggatcgcattttcattttgccgaagccaacggcgccctttccttcaatcgggacaaagcaatcggcatgcgccttgatatcccgtcaggcacatctgtccgttttgaaccgggagaagagaaaaccgtcacgctcgtggaaatcggagggcgaaaaacggtcagaggtctcaacggcatggccgatacgtatatggatgagcggggaaaagagaagactctgtcaaatcttaaaaaagccggatggatggaggaggcgatccgatgaaaatgtcacgtgagcaatacgcagaactgttcggaccgacaacgggagacaaagtcagactcggagatacggatttatggattgaagtcgaaaaagatttcacgaattacggtgaagaaatgattttcggcggagggaaaacaatccgggacggcatggggcagaacgggcgtatcaccgggaaagacggagcgcttgatctggtcattacaaacgccgttatcctggattataccggaatcgtcaaggcggatatcggggtgaaggacggccggattgtcggcgtcgggaaaagcggcaaccctgatattatggatggggtgggcccgaacttgattatcggtgccggaacagaagtcatttccggtgaagggaaaatcgtaacggccggcggggtggatacgcatatccactttatctgcccgcagcagatggaagtcgcgctttcttcaggcgtgaccacgcttctcggcggcggaacgggtcctgcgacgggaagtaaagcgacgacttgtacatccggtgcatggtacatgtcgagaatgctggaagcggccgaggagtttccgatcaacgtcggtttcttaggaaaagggaatgcatccgataaagcgccgctgatcgagcaggtggaagcaggcgcgatcggcctgaagctgcatgaagattggggatcaacgccaagcgccattaaagcttgcatggaagtcgcggatgaggcggacattcaggtggcgatccacacagacacgattaatgaagcgggctttttagaaaatacgcttgatgcgatcggcgatcgggttatccatacatatcacatagagggagccggcggaggccacgcaccggatattatgaaactcgcatcttacgccaatatcctgccgtcctctacgacgccgacgattccatataccgtcaacacgatggacgagcatcttgatatgatgatggtctgccatcatttagattcaaaagtccctgaagacgtggcattcagtcattcacgcatcagagcggccaccattgcggcggaggatattctgcacgatatcggcgcgatcagcatgacgtcatctgactcgcaggcgatgggcagggtgggagaagtgattatccggacatggcaggtggccgataaaatgaaaaaacagcgcggcgctctatcaggagaaaacggcaatgacaatgtgcgcgccaaacgctatatcgccaaatacacgatcaacccggccgtcactcacggcctgagccatgaagtcggttccgttgaaaaaggaaagctcgccgacctcgtactatgggacccggttttcttcggcgtcaaacctgaacttgtgctcaaaggcggcatgatcgcccgcgcccaaatgggagatccgaatgcttccattccgacgcctgagcccgtgtttatgcggcagatgtacgcatcatacggtaaagcaaaccgaaatacctctattacatttatgtcccaggccggtatcgcaaacggtgtgccggaaaagctcggccttgaaaaaatgatttctcccgtacggaatatccgtaagctgagtaagctcgacatgaagctgaatgacgcgatgccgaatatacaagtcgatccgaaaacctatcaggtgttcgccgacggagaagagctggcatgccagcccgtcagctatgttccgctcggacagcgttattttttattttaatccctctccggccggtttcccgccggcctgtttacacctctattgccaacttgatttcatcctgccgcccgttttagtgtatattagtagttgacaaacaaatgaaatgtaactattgtggttacaacggtggtgaaaaacatgattaacagccgtcttgctgtggccattcacattctatcgctgatctcaacggatgaacgggcgtcatcggacatgattgcgggcagcgtaaacaccaatcccgtcgtcgtgcggagaacgatcagccagctgaaaaaagcgggtattctgacatcccgggcgggtgttccgggagccagcctgaaaaaagatccgtcggagatcaccctcttagaggtttacagggcggtgcagaatagggaagagctttttgcggttcacgacaatccgaaccccgactgtccggtcggcaaaaatattcagcgcgcgctcgatgagacgttcggaagcgtacagcgggcaatggagaatgaacttgcgagcaagtccctttatgatgtaatgaatcatctcttttgttaaaaagagatgggttcatgccgctattggtgtaacaaaaatggttgcaagtgataatgaggaaatcacggttttggctccatattcaggcaagcctggatgcggggttgcgatctgtttaatgaactaaaggaggtggtaaccgggatatttttattttgcttaaggcttatgtgaaggtgtctgttgtaagcgggttaccgaaaaatgacggcactcttattttaatacgcgaaaactgatggagaatatcctgcctccggtaatgccaaaaccgttcgcctcttaacaatcattataaaatttctcaaggaacgatcagcagcccgttagctgcccctaattaaagatgagctgttaccacactgttacattagaacttccgctgcttttatatccttctgtcgctaagacttgataagcccaattactgcccagattcattccatggctcttccaggcgttaacatgattgctgaaagtgattgcagcgttgcttccggttggtctcttcgactggcgaacactccagtactgcgtaaaagtagtgttatcgccatcaatggaaggtgcgttataacgtgtcgttgtatatatgtcatatgtacctccatcactttttacggtacctttatacgttccggtaggtctgtaagtaccccatgaatccactacataatattcgatgagaggtgctctcgtccagccatataaagtcaaatatccattgccattcggcgcccagactccggcattatagtttattgttctaaatggcgagcctgtagtccagcctttaccaacaacgaaatttccggtattagaccaattaacactgtaattcccgccagatccattgactgcgtttactgttccgcccccatcagtccaattttgccagtaatctgtgccagctgcagaggcggttgccgaaaacatgctgatactcatgaatgctgccgttaatccaactaagaatttctttttaaacttaaacatatgttacctcctatactattttttctgactttgacatgaggcagcactcgtaaatatttaaaacaattacgaacgccaacgcttttgatcgttcctttcaatataatagcatgaatacatgagtgaatattaagaacaattgtaatttaattacaaagacccaaaaaaatgtatgataagcggtcttgttccaccatggcttttatccttattttgcagaatcacaattcttgcttctaaacctgatcaggaacagtcgaacaattgagtgatttcagctgaaactctgaggaaaagcttttttgatgtgacggcgacacgtctggctgaagccggaatgtctgaaagaatatctgcagacagcgtctcagctgcgccattatgccatcgccgtattggcaaatccaaagcagaaaaactttcccgttatcggagaagcggaataagaaaaaatcccgggcggatgcgccgggattttcctttttaatatgtattggcatcaatattattaaacacgccgtccatgatgccgagcgtcatgaggacaatgaagagaacgataccgagaacggacaagccgaccgtcacaatcaggtagatcccctgcattttcacgaactttgcataattctccagcatatgttcctctgtcagttcattgaactgctccgccatctgtcccgcttcatttgccgagcgcatcagaaaaatgccggcaatgatctgcagaacgccgggaatggctccgattaaaaagaaaaacgcgcccgacagcgccgcaaacgcacccatgataataaataaaatacctgtcgcttttccccatttcgaaatagaaataagcgaacgattcactgattcaggtttcaaactatggcactcctttacaaaaaaatactcacttttcatttatacactattcggtcattcttttgaatataaaatgtgttttttcgtgccgtgtccgtttttatatcagaaaattcccgagaaacaccccgggaattacaaaatcggcgaaagaagtcttgaaatcgattctttaatgcggatccgcagcgaacgctcctgatattcttcatacgtatattttctggagacgagcagatcttctttaaatgaggaaatgagttttttcgcgatggtgacgtcataaataaaggcgttgacttcaaaattaagtctgaagcttctgacgtcgatattcgccgtaccgactgaagccgtctcatcatcgacgacaatcgtttttgcatgaataaagccattatcataaatgtagactgaggctccggctttcaaaaggtcgccgatgtaagataaagtcgcccagtaaacgaaagcgtgatccggcttgttcggaatcatgattttgacgtcgatgcctgacagacaggcgatcctgagggcatctaaaagacttgagtcaggaataaagtaaggcgtctgaatcaggatcgaccgtttggccgttgagatcatcttgatatagccgtttttaatttgttcccattctgaatccggtccgctcgtgacaatctgcatcccgacattgcccttcggctcgcattccggaaaatgattcggaacgtatgtgagcgtatgatgatgggaggcttggttccaatcgaggataaaccgtgtctgaatggcgtgtaccgccgtgccttgaagcctgaggtgcgtatcgcgccagtagccgaatttcggattcaggccgagatactcatctccgacgttaaagccgccgacatagccggtttcgccgtcaatgatgacgagcttgcggtgattccgataattgagccgcaaattaatcggacgaagcctggaaggaaaaaagacttccacatggccgccggcgtcccgcagcggtttgaagaatttttttctgagtgatcttgaaccgagttcatcatataacactctgacttttacgccttcgcgtgcttttttcactaaggcatcgcgcaatttttttcccagttcatcacctttataaatatagtattgaaggtgaatgtgatcttttgcgttggaaatgtccttcattaagcgtttgaacttatcgcgcccgtccgtcagaatctccaccgaattatcctctgtaaagactgcgtggttgttcatgacaagcatatagatgaggtctttattatccacagtcgctctgttgttaaattggaattgcctcgacttcagatctttcagctgagacttcagcagcttttcaatcccgatttttttacggtcttcccattgaaacagatgcttgcgtctcaggttatggccgaataacaggtataaaataaaccctaaaatgggaataaaaaaaagaaccaagagccaagcccatgaagcgctggcatcgcgtctttctttgaaaatcatgatgacggccaaaagtatatttaaaacgaaaaaaaatccgaataaaataaatgaaatgctcactttgcaaccccgctatatcatatttatcaagactgtgcccattagtattccgacaagtgcagcaatctgattcccatttcaaattataacattgacattttgaaagaataaagagccggaatcaaagatgaatgcagttttctttcaaagaaagttccgggtgcgttaaaatatgcatatatgaaaaagaagacaaaaatgacagcaaaggggagagggcatgaagctggagcatgcggaacaattgccgggattcataaaaaaagaaattcagaaaatacaaatcgccattgcgccgctgatgaaaaaaagcatcatttaccgttttcttgcttttccgctcgccgcttttagtctgtttcatctggcatcgcttttgattcaggccccttccgggagaggagctctcgtgtcggccggcatttttgcactccttgcggccttgggtcttgcgttgtttaaggaagccggctatcagcggaaacaggtgcaaaaaacgatccgcctttatatgctgaacagaatcagaaaaagcgatattctgtccgaggaacggaaaagcgcctatacccggctgattgccgaggagccgtctgcgatgaagagctttattgaatttttaacggaagaagaccggaaaaaagaaatgctttattaaaaaagagctgacgcgcgatcagctctttttgtcattcaaacaccgggtcgttctcatagtaatatgaatcaggcgtgtcatacgtatcagtgctgtgataagcgataattccgattacagcgaagatgacgactaaaataaaagcgagaatgcccaataccacactggatgccgcgtaaaaaaactgcattttgataaatgacgcgtaatgtgcaagcatactttcttccgcgttttcttctagtccttcctgaagggcggcagccgcttttgccgagcgcatcagcatgacgccagaaatgatgagcagaacccccggaatggctccaagcagcgtcacaatcgctgacagagcggaaagagagcccgtgatgatcagaaacacggcggtgatctttccccatttggcgatgtcggcaagggaacgggcttttttattgagcggctggttttcgtctttgtctttatcgatggtgatcatgacagttctctccctaaaatgttcaagtcatatcgttttccgtccatttcggcgatacccgggaatacgccccattcggtaaaaccgaatttttcaaacagcttaatgctcggcacattatgtccgaagataaaagccatcaggctgcggatgccgattgccggagcgagtgccagggcttctttcagcagaaagcttcctgctcctttgccgcggcaatcctgatgcagatagatgctgatctccgccgttttgtcataggccggacggccgtaaaacgtttcaaagctgatccaggccgccactttgccggtttcatcttccgcgaccatcagcgggcgccggtccgtgtgccgcaaaaaccaatccatccggtctgcgggcgtcacttcttccgtatcagccgttaccattcgtgaggcaatcgtcgagttgtaaatggccaccaccgcatctaaatcctccaatacggctttgcgcagggtcaaattcatattccgggatctcccttcacatttcattacataaataagtgcaatctgcacatactatttccaaaaaagttttttatgaatgtgtatatattttcagaaaagtgttcagaatgttgctgaggtgatgaacaaatgagagaggaagaaaagaaaacttctcaagtcaaaaaacttcagcggttttttcgcaaacgctggatattccctgcaatctacttagtcagtgcggccgtcattttaacagctgtcctttggtatcaatccgtttcgaatgatgtgaaggacaatctgacgaacaacggcggaaactccgcgtatgacagcggcaaagacgatgccgtcgaagtaggcaagtcaatggaaaacgtcgcaatgccggctgctcattctgaaaatgtttctgttgtgaaaaagttttatgaaactgatgccgcaaaaaaagagaaagaagcagcacttgttaactataataacacgtacagcctcagtaaaggaattgacttagctgagaaagacggaaaatcatttgatgtttctgcttctctgagcggtacggttgttaaagctgctaaagacccggtactggggtatgtggttgaaattgaacactcagacggcctgtctactgtctatcagtctttatctgaagtcagcgtggatcagggcgacaaagtaaagcagaaccaggtcatcggtaaatccggaaaaaacctttacagtgaagaaagcggaaatcacgtgcactttgaaatccgcaaggacggcgtagcgatgaacccgctcaattttatggacaagccggtaacatctattgaaaaagcggcggctgaagagaaaaatgctgtgacagaagaaacggaaggggcaattcagcagtcttccgagaaaaaagatgtgacgcctaaaaaagaaaccgaagaaaaaccaggtgacaaagaggacggcacaaaagacaagacagatggtaaagatgacggctcaatgaaagattcgggcaagtaatcttgatcccaaagcgcctatcagctctgataggcgcttttcatattgccgcatgtgcctttatactagtagaaaacgaaggagatgctgaatgaataaatgtctggcggccgggtggctcgtctttgttttcgtttctgctttgactgaaagctttcacgatatgattgtgtcgcagacggtgtccttccgtttcacgccccatccggatatgtccggtttctttgtgttcgatatggcggagctcgccataccggaagcggcgattcaaaagcttgggcacgcgttttcattttttgtgctcgcctatttgtttttcagagagcgcaggcgcatgaagagggcggtgctgtatgcattggccgccgctttcctgacagaaatcgtccagctctttttcggcagaaacggatgcctccgcgatgtgctgattgacagtctcggcattgccgcattctgtgctttacaaaggaaaaagcatacagccaaacatacaaaaaccggcagtctgtgacagacgccggctttttttttatatattatggtttgtcgatttgcttttatgaacgatactttcatagattcgcacgatcagatcgacaatcggacgaagcacatttgaaaatctgaacagcaggaatccgacaatgagggaaacgataatgcttccgagcacatcgatcggataatggtggccgacccaaattcttgagaagccggtcaaaaggccgaaaatcacaagcggccagccgagttttttgttgcggaacagaatcgcaattgaaatcgccaaagcgcctgtcgtatggtcactcggaaatgaagcatccgcggcatgagggatcagcgtatgaaccgtatgctcgacaaaggggcgcggctcgacatagactttcgtgatgaggtagttgatgataagcgccgcaacacccgtgaagcccgcgtacagggcgttttgtctgccttttgtgcttccgaacagccacatggcaagcaggaaaagggcgtaggcgtaaatggcgtattccgtaataaataccatgatagagtcgagaatggcgctatggtgcgacaaaccattgatcgctttaaatagttcgtaattcacaaatatcaccttttatctttattttatatgaacagtgtaatgcttttttctatgagacacaattggtattaaaaataatcataaaaaagtaaacagaatgaaacgtgactgtattactgtgcgtcaagtatgcgggaaaagaatagccgaaggagttttgtccgttgttgaaacgtttgaaaaacgccgatctgccgcttgtgtttgtcattatgctgctttgcggattcggcttgttaatggtgtacagcgccagtgatgtgatggggtctcagcggtacggagatccatcctatttcttccataaacaaagtacctctttactgatcggattatgcttatttctatttgccgcctgtctgccgtataagcggtatgcgcggcttgtaccgctgtttgtggtcggttcgctggtattgctgctgctcgtattgataccgggaatcgggctggagcggaatttttcccgcaggtggctgggagcgggcccgcttgtcgtacagccgtctgaattggcgaagatcgccatgattttgtatttcgcttcgatttatacgaaaaagcagccgtacattcatcaattcgtgaaaggggttctgccgccattagtgattttggggaccgcttttctgttgacattggcggagcctgatttagggacggcttccttaatcctggcggcgtgcgggtcgattttattatgtgccggcttgaaaaaacgccatctaatcgtgctcggcgcgacggcggtgtcgggggttgtttatctcgcattttccgcttcctatcgtgtgaagcgcctcgtttcctttaccaatccgtttggtgacgcgaacggggacggctatcagctgattcaatcctattttgctatttccggaggcgggtttttcggaagagggcttggaaacagtgttgaaaaaatgaactatctgcctgaggcgcataccgatttcattatggccgtgatcagcgaagagctggggatattcggtgttctgatcgttttgggattatattttgcgttaatgcttctcggcgtaaaaacggccgtgcgggctgatgacccgttcgggaagcttcttgccatcggaattacgtttcaattaatgtttcaggttgtattgaatttgggagcgatgagcggactcctcccggttacaggtgtaccgcttccgtttatcagctacggcggttcttcattgattatgacgctgtttttatgcggcatactggtcaatatcagtacatatgcgaaaaaacaacccgtacggcataagcggcctgtcccgcatgaaaaaaaggtttcttctttttaatgaagcctgaaaaaaacgcccgggacatgctgtctccgggcgttctgtctgtttataaagctcctggtccttcttctccggtgcggatattaatcgtgtttccgatttcatagacgaatattttgccgtctccgggctctcccgttttcagcacttttttcgccgtttccacgacttgatcaacgggaaccttgctgacaacgatttccactttcagccgttcatacacattgctttcaattttgactccgcggtacagttcggtgtgggctttttgaaggccgcagccgtgtacgttggagaaggtcagcgatgtgactccgattttaccgagttcctgtttcaatgtttcaaacttagccggacgcgtaacgatttctaccttgaacatttgaccgctcatctaagccactcctcactttataagtcctgatatgctttttccccgtgcatcgttaaatcaagcccaagtgactcttcttcttcactggcgcgaaggggaatgaacagacctacaattttaatgataacgaaagtgacaataaatacaaatacataggttgccgcaatggccgcaatctgcttccagagcagtcccggatcgccgtaaaacagcccgtttgccccgccgtcattgacggaagtggttgcgaataaaccggtcgcaatgccgccccatgtcccgccgatcccatgcaggccgaaagcgtcaagcgcatcatcataaccgaaagtctttttgagccaatacacgccccagaagcagacaagcccgccgatgaaaccaattacgatggaagagaatggcgtaacgaaaccggcagccggcgtaatggcgacaagcccggcgatagcgcctgatacagcgcccagcatggtcggtttcttgttcagcatccattcgattaaaatccagccgataattccggccgcagccgcggtgtttgtgttaatgaaagcaaacatcgcgatactgtcaagcgtgagggcgctgccgacattgaagccgaaccatccgaaccagatgagcgctccgcccaagaacgtgtaaattaagttgtgaggggaagccgccgtgccgtccttgcgtttcccgagcacaatcgccagcacaagcccggcgactccggaagaaatgtggacgacgtttccgcctgcgaagtcaagagcgcccatttggccgatccagccgccgccccatacccagtgcgcaacgggggtatatacgagggaagcccacaaaaaggaaaatacaagaaaagcactgaatctcatgcgttcagcaaatgctccggaaataatggccgttgtcagtacggcaaacgtcatttggaacatcatgaacaaggaatgcgggatcgtatcactataacttccgggttcaaagccgacccccttcagccccgcccattcaatcccgccaagccatgtattcccgggggcaaaagcaagtgaatatccgtacaaaacccaaacgacggatacgatggcgagagaagaaaaactatgcatcgccgtgctgagcacgtttttgctttttaccattccgccgtaaaacaaagccagcccgggggtcatcagccacacgagtaaagcgcaaaagaacataaatactgtatcgcccatctgcatgttgtattcctccgtctcattcagaatgtaattgtgattaattcattattatagagaaaaaagaacgataaaacattttcgtgtaaggttatctgacatggttttttgcgttcataatactgttttttcaaatgggtgccgtgcgactttatatccataaaaagagcgccggagcacggcggaagaaatcctgtccgggaaagagtaaaataaacggggtgagaaacactaactgcatcaggaggaatcattatgacaacatcattaaatctgcaatttgaaaaaacggctttggtcattattgatttacaaaaaggcattgtgccgatggataaaagcggtaccgttgtgccgaacgcgaaaaaattaattgacgtgttccgggaaaaaggcggatttatcagctttgtgaacgtggattttcatgacggagcggatgcgctgaagccgctgacggatgaagaggcggcggggcattcggctccgccggcggattgggctgaatttgtgcctgaaatcggagtgaaagaaaacgattatacggtaacaaaacggcagtggggcgcgtttttcggcacggacctggaccttcagctcagaagacggggaatcgacacaattgtgttatgcgggattgcgacaaacatcggtgtggaaagcacggcgcgagaagcttttcagctcgggtatcagcaagttttcgtaactgacgcgatggcgacattcagcgatgaacagcacgaagcgacactcaagtttatcttcccgaaaatcggcagaagccggacgacggaagaatttatcgcacagacaaaatgacaatctccaaaaaaagccgcgtcctgtttttgacggccgtggcttcggggacgatgctgaacccattgaactcgtcgatgatttctcttgcgcttcacagtattcagcatgaatttcacctgtcgtttacaacggtgtcctggctgatatcgtccttttatctggccagcgcggtggcgcagcctgttaccgggaagctcggtgatatgctcggcaggaagaagctgtttttgatcgggcttctgcttgttgccgtctcggcggtcggcgcgccgtttgcgccgacttttatgactttgctgatcatgcggctttttcaatcgatcggaagcagcgcgatatatccgtccggcgtcggattgatccgttcaaatatacaggagaagcaggcttcggcgctggccgtcctgtcaatctttgcatcagccatgacggcgctcggtccgactctcggtggttttctgatcgtttggggagggtggccggcaatctttttcgtcaatctgccgtttatcattctcagcttttttctcggaatgtatatgtttccgaaagatgaaaaacgcgagatcggcggcttgaaaggcgtgctccgccagcttgatacgatcgggatactcctgtttgccggagcgattatccttctcctgtcgtttttattgtccttcagtacgaagcctcactatacagaaggcgtattcgggcttttgtttgtcgggctgtttatctggcgtgagctgaaaacagagaagccgtttatagatgtcaggctgtttaaaacgcaccggaaactatcgtcggtgtatattcaatttattttgctgaatatattcttttactgcatctttttcgggcttccgagctattttcaggatgaaatgcatttgtccgttcagacaagcggattgattatgctgtttatgtcgggcatgagtatcctggtgtcgcccctgaccggaaaatggatagataagaaagggcttcttcagccgattgttgccggaacctgcctgactgcgatcggggcggtgctgttaacgtttttctttcttcaggcgcctatgataggaaaagggctgatcctgtccgtgctgggtgtcggctacggcctcggaaatgtcacgtttcaggcggccatgctgaaaacgagccctgccgacatggtcggaacaacgtccggcctgtttcagacctgccggtatctcggttcgattttgtcttctgtcattttgggcattcttttcggaaaagaaattaccgccggccattttcatatgctcggcacgattcttatcgttgtcggcgccgtaagccttttgatggcgttccggttttcggttctcctcaaaaaagcctcttaacaggcgcaaaaaaagagacgggctctccccgtctctttttttgtgtaatgtgctcaaaaatcaaaacgattattgtcgatagcgaccaatgttatttgcggaattttcagttatattttttcgcatgtgatgtaaggaaaacgtacatgtgggagggagaaaatgaaaaaaacaacgagtgatcggctaagcaacaaagatttactgcctttagaagacggcgaacggacatggaaagcggtgaattttgcatccatctggatgggctgcattcataatatcccgacctatgcgactgtgggcgggctcattgcgatcggtctttctccgtggcaggtgcttgccattatcgtgacggcgtcactgattttgttcgccgctttggccttgaacggccatgccggaacgaaatacggcctgccttttccggtcattatcagggcttcttacggaatatacggcgctaacattccggcgcttctcagggcgtttacagccatcatgtggctcggaattcaaacatttgccggaagcacggctttacacattctgcttttgaacatatggccgggctgggggagtctcggaggagattggaatatattcgggcttcatctgccgggctttctgtcgttcattttcttttggggcattcatctgcttgtgctgcggcacggcatggaatcaatcaaaaaatttgaagtgtgggcgggcccgcttgtttatctcgtcttcggcggtatggtctggtgggcgatagatattgccggcgggctcggaccgatttactcacagcctggaaagttccataccttttctgaaacgttttggccgtttgccgccggagtgacgggcattatcgggatatgggcgacattgattctgaatattcctgacttcacccggttcgccgcgtcgcaaaaagaacagattcgcggccagttttacggcctgccgggaacgtttgcgctgtttgcgtttgcgagcattacagtgacatccggatcacaggtagcattcggagaaccgatttgggatgtggtggagattttggcccggtttgataatccttttgttatcgctctttcggtcatcacgctttgcatcgccgccgtctcggttaacgtggcggcaaacatcgtgtcaccggcctatgacttggcgaatgtcctgccgaagtatattacattcaggaggggagggtatttgaccgccgttttggccctgttcacaataccgtggaagctgatggagagcgccacgaatgtttatgcgtttctcgggctcatcggcgggatgctcggaccggtggccggggtgatgatggctgattattttatcatcagaaaaaggcagctctcagttgaagacctttattcggaaaccggacagtacacttattacaaaggctataattaccgggcctttgccgcgacttttctcggcgcgtttatttctttaatcgggatgtacgtcccggcgttcgccggcatctatgatatctcctggtttgcgggtgtcattttgtcatgtctcggttatacggcgcttatgtacattcatcctccttatgtaaaagcggcgggacgaatcgcgcgggaaagagcggccgaataaaaaaagccggggctgcccccggctttttgtcatatcagtctgcgattgaaacgtttccgtccgcttgaagcggcgttctttttttctggctccagccatacaggagtaaagcaatcaggacgaacagccccgcggccagataaatcgaatggaatccggccgaagcgacgaagaggccgaatacataggacccgccggcaatcccgctgtcaaagaaagtgaagaaggtagccgtcgcaaagcctgaacggtgtccgggcgagttctgaatcgccagcgtctgcatacacggtacgatagagccgtatccgagaccgattacggcaccggacaagagaagcatgagggcgctgtttgtcatcgccagcatgcaaagccccgcggagaacacgataatcgacggatagatgacgattcccggccccactctgtcaaacagctttcctgtgaaaggacgggcggccatcatcgtcactgcgaaacagacgaagaaatagccgctgacatccaacaggtggatcgtctttgcataaacggataaatatgaagtcacacttgaataacagaaagaaatggacaacccgacaatcgcgattttaagtgcgcctttttcaaacatgtcggagaaagaaaaacggaagacagtcgttccgctgttgttttgatccggcacacgaatcataaaagcaatcagcaagcctaaagaaacaaatacggcaaaaatcgtaaagaaaaccgggaacgaaatgactttcacaaggctcagcccgagaaacggaccgatcgccatggcaaggttcatagacatcgcgaaataaccgagcccctcgccgcgccgcttggcgggaataatgtcagcggcaattgcgcccgtaaccgtcgttaaaatgctgaaccagatgccttggaaaaaacgcagtccgagcagcagatagaaattgtgtatcggcaaatacagataagaagacagggcgaacagcgccaaggatacaatcgtcattcttttcttgccgaaccgttcaataatcgcccctgaaaaaggacgggtgataatagcagataacaggaacaggctgatcaaaagccctccttgcgattcactgccgccaagctcctgaatcatatagataggcagcacggccaaaaatgtataaaagaacacaaagacaaataaattcacgagtacgaccataataaaatctttggtccagatcgagtcagatttactcaaaagtacagcacttccctttcttttctatttcgttaaaaacacattcagaaactcagaaaaagcttccttatctccatcctggaaatccgcaagcatgtcttcctcgaacttcagcatctcttgattgatgctgtcgtatttcaattcagcttccttcgtcaggacgacgagcttttcccgcttgtcttctccctgttcgcgctgaatccagccgttttcttcaaggcgtttgatcgttctggtaacggtcggcgcctcaacgttcagataggaccagatttctttttgggtcatcggtccgatcgtttttaagcaatataggattgaccattgagaggagtacaggccgaatggttccagccgttcattggctttcttcgtaatcaggcgggcgcattgattgatttgatgaatgaggcgtctgttgacgtggatcatttccgttctccttttcaaaaaacttacctaagtaactaattgcgctgtttcattctacagcaggatcgcgcggatgtaaaccccccgatcaaaaagcagaaaattatgacccgccccttgtccttattgagtttttagcatattcccaattcattgctaatacactgttacaaacctatcaaagagagtgtttgaggtgagggatcgtgggcatatttctaaaaccttcttatataatcggacaacgaagaagctgcatcatcagtgaatctgttacagaatacggatctcatttcacacttctcacatccaactggggaggtcgagtggtgtgcacgattacatcaaagagcgaacaatcaagattggtaagtatatcgtggagacgaaaaaaaccgttcgtgtcattgcgaaagagtttggtgtttccaaaagtaccgtacacaaagatctgacagagcgcctgcctgaaatcaatcctgacttggcgaatgaagtaaaagaaatactcgattatcataaatccatcagacatttaagagggggagaggcgacgaagttaaagtacaagaaggatgaaattcttgaaggggagcccgttcagcagccgtagcgcctgacgtctgccgggcccttttttctcctcccgggcggtttcgcgaatatccgcaaaattttgtcaagaacttatatcgttcagcagcttttttttgataaattatgataatatatataattagggcacaatgtggatattttactgtgaaacagatatcaaggaggatataaatagatgtttgcaagggatattggaattgacctcggtactgcaaatgtactgatccatgtaaaaggaaaaggaattgttctgaatgagccttccgttgtggcacttgataaaaacagcggcaaagtgctggctgtcggtgaagaagccagacgaatggttggacgtacacctgggaatattgttgcgatccgtccgctgaaagacggcgtaatcgcagacttcgaagtaacagaagccatgctgaaacatttcattaataagctgaatgtaaaaggacttttctcaaaaccgcgcatgctgatctgctgcccgacgaatattacatccgttgagcaaaaagcgattaaagaagcagctgaaaaaagcggcggaaagcatgtgtaccttgaagaagaaccaaaagttgccgctatcggcgcgggtatggaaatcttccagccgagcggtaacatggttgttgacatcggaggcggtacgacagatatcgcagtgatttctatgggcgatattgtcacctcctcttctattaagatggctggggacaagtttgacatggaaatcttaaattatatcaaacgcgagtataagctgctgatcggtgaacgtaccgctgaagatattaaggtgaaggtcgcaacggttttcccagacgcacgtcatgaagaaatcaccatccgtggccgtgacatggtttccggtctgccgagaacgattacagtaaacagcaaagaagtagaagaagcccttcgtgaatcagttgccgtcattgtgcaggccgccaagcaggttcttgaaagaacaccgcctgaattgtccgctgacatcatcgaccgcggcgttatcattaccggcgggggagcgctgttaaacgggcttgaccagcttcttgccgaagagctgagggtgcctgttcttgtcgctgagaacccgatggattgtgttgcggtcggaaccggcgtcatgctggataacatggacaagcttccaaaacgcaaactgagctgatgataaaacctcattctgaaaaagaatggggtttttttctgtcaaacccttcacgaacgggaatgtaaatccgataataagaaaaaatgctgattttcattatagaacaaatgttccggtgaggcaactggaaataatgctatttcagaggtggaagacttgttaaaaggattatataccgcaacgtccgcaatgattacacagcagagaagaacggaaatgctgtcaaataacatcgcaaacgcgaatacatcagggtacaaagaggatcaaggttcaatccgcgcctttcccgagatgcttctgagccgaatagaaggcgacaaaaaaacgaaaatcggttccgtcaacacaggcgtatacatgcaggagctgaaaccgttgtttacgcagggaagcctgaaaacgaccgatcagccgacggatatcgcgctgatggagaatcaggttcccaagaatgccgaaacgaatgaaaacgccgagctgttttatcccgtgcagaccgcgggcggcgtccgctattcaaaaagcagcactttctcattaaatgaaaacaatcagcttacgataaacggaaaccttgtgttatcaacaaacggacagccgattacagtcgacaatgaaaaattcaccgtatcagaaaacggaacggtcacgacaaacggccggccggcggggcagattgacatcagaatggaagaagacgtgcgcaatctgaaacgggacggcaatgacctatacagcacggccgacggctctgaactgccgagcgcggcggcgaatccccaagtctcatattcattaaagcaaggcgtctcggagctttcgaacgtggacgtgacgagcacgtatacagaaatgacggaagcatacagatcatttgaagccaatcaaaaagtcattcaggcttacgataaaagtatggataaagccgcaaatgaaatcggcaaagtgtaacaaaatgggggacattcaattatgatgctcagatcaatgctgacggcttcaacagccttaaatcagcttcagcagcagatggatacagtcagcagcaacctttcaaacagtgatacgacaggctataaagcgagggactcccgcttttccgagctgatcagacagcagtatgaccatatagatgacaaaaaggaaaattcaccgaacatgcggaaaacgccgcccggcctgcgtctcggcgccggaacggtcatgactccacagctggactcagggcagggaagcatcaaaaaaaccgaccgtgaccttgatatcgcgttcacatcaccttatcaatatcttcaggcagaagcggacggacggcgggtgtatacaagggacggctcactttccctcaagccggccggcggaaatgaccggctgcttcagctgatgacagcgggaggcaatcccattctcgatgagaacggtcagcccatacaaattgacagttcgctgactcagctgaaaatcagcaaaaccggaacgctgactgcttcagaccaggcgggaacccgttcgcagacgtttaatctcggcattgtcaatgtcaataatcctcaggcgcttcatgcggaaggggataatctgttttccgtaaacggcgcgggggcttcagcgattgaagagcttaccggcgcaaaccggcaggcaatcggcatggagcagggcgcgcttgaaggttcaaatgtcgatatgtcaaaagaaatgaccgacttaatcgtgtctcagcgttcctatcagctgaacagccgcacgattacattgggagaccaaatgctgggcttaatcaactcagtcagataaaagaaggggcgttttgatcagccgcgcatgataaaaaatgcggctttctcaaaatcgcccttttttttgtagtaatcagtaatatcctgaagcagcacttccaaatccacccacgcttcaattttctgcagctccagcacaagcttctgcaatcggtcgtacgggtcctcctgagcggtgtacaatatgttgagcgcggtcagcttcaatttcataatcttgttctgcactttttcagatatgtataaacctttctgcagcacggtttgtccttcggcgtcagatccggttttaaaaagtgctctgaccgcttcgtacacacaatgaaggtaggaaacgggagactctttctcgaaacgctgattgcccaatacctttttgtaaaaagggagggcctctttatcttttttctgggcggtctttaaaaaaccaaaattataataggcgtggcacagcaggttattgtcattgatccggtccgttatctttatggattcattaaagagctgttctgcgtcgtcatagcgtgtctcgtctatataattcacggcgagaagcagccggcagctgagcgtttttttgatgtagccggcttcatcttgatagatttccagcgctttattgacatattgaatggagagcgcaggcgacttcatcatgtaatatgcacccgctgttttataataaaattcagcggcttcgaaacggtcctgaatggccggcaggtactgttcagcttctttaaagcggcagacagcacggttcggagcgccattcaccatatggaataaccctttgaaaaaatagaaatagtaagtcaattcatgatccatctcatctttgcgccgcttcagctcgcagaacagcttattcagaccgtcttttttttcaaacagcagctgaaaccgtgcgaaaaacagctgatatctgagtttgagctttgcattcttttgtaatttggggagatgctgattgatttgttcgtgaagggaacgggctagatcgaattggcgttttcccatggcgtcataccactcattcagcatcacccgcgtacgtttttcagtaaacttagcaatcatcttccaacctctttgcatagggtaaaaatctttatttatcataacacattaatggacgaggctcattgccagctggttacagtttacagcgcggttgaaaaagaaattgattcataatatacttccaaatgtacagattggttgccacatatgccttctatacatactattgtcgatgaaggagatgtcaagagaatgcttgatactcagcaaattaaagaaattattccccatcgctatccgtttcttctggtagacagaattacggaagtcgaagaaggaaaacgggcggcgggatataaaaatgtgacggcgaatgaagattttttcaacggccattttcctgaataccctgttatgccgggcgtattaatcgtagaggctttggcgcaggtcggagcggttgcgatgctgattaaagaagaaaaccggggcagactcgcattttttgcggggattgataactgccgtttcaaaaagcaggtaaaaccgggtgacaagctggagcttgaggttgatattacccgcgcgcgcggtacgatcggacgcggcaaaggcgttgccaaagttgacggcgagctcgtgtgtgaagctgaattaacctttgcgctcggagaataaaaacaaacaaatgggcttataaaaaagcccattttgtatagaaagaggtgaatgtaatgtggtcagaatttaaaagctttgcgatgcggggcaatatcatggatctggctatcggtgtcgtcatcggcggcgctttcggcaaaatcgtgacgtcgctcgttgaagacatcatcatgccgctggtcggcctgcttcttggcggtcttgacttttcagggctggccgtgacattcggcgatgctcatatcaagtacggaagcttcattcaaacgattgtgaacttcttcattatttcattttctatttttatcgtgatccgcacaataggcaagctgagacgtaaaaaagaagcagaagaagaggctgaagaagccgaggaaacagatcagcagacagaactgctgactgaaatcagagatctgctgaaacagcgggctcctcacaatgattagggcacaaaaaaaggctggatgattaacgtccggcctttttcttgattataatttttgtttaaacgcttcaatcagccggctgcccgagtagccttctttcacgagcgactccagaatgctttctgatccagggtgatttcttgacaccatttgaccgtaaattaaaacttgtatacttctttccaactggacaatatttttgatgcttcccgtcagctgggcggggcggttgctttttttcgtaatcgttacaaacaccttcgcttctttctggcttttcatcagcatgtcaaaaaaagacaagtgttcggccgggaccagtgcttcaattaaccaatgattttctccgtcctctttattgataatcaatccgtctaaaaggggaaactgttcaatcggctgatcgtctttatctaaacgttccacattcagatcaaccagtttaaaggttttcatctcttattttcacccctgttgtccatgtttttcgttcatttattataacacatatcatttttcccgggaaaatgctgtaagacatgcttcatcatttttgtaggcggtcaacatttaatcatttctattttttcattataatgtaaaagaatatggtcatggagagatgcttatgaatcaattgcgcctgaaggaaatctatatagaagacggttcaaggcgaaaagacgatcattcctacttggtatgcaaaaaggaagattgtgaggtgcatcttaacagaaggggaaatgtcgtctttttatatgaaacaaaagaccgcatggaacagtataaaattcagctttcactgactgataaaaagctgagtttttactggttcgcatgggatggcggaaagtttgtccgcatgtttgagaaagactggctcaaaacgaaacttttctcgcggctgctcaaaaatacatattacataagcggtcaaaaacaaaagttttttttatcagaaagaaaaacgaaaacataagagcagcctgaacgaataacggctttatccgctttttgctttcacgagcccttgtactacaatgaagccagcctcgaaaaagagaggaggatacggcttgtttaaccacgttatgcttgtcggccggctgacgaaagacccggagctccgttttacatcagcgggcattcccgtcgcgcatattacgttggcggtaaaccgcaattttaaaagcgcgtcgggtgaaaccggaaccgacttcgtcaactgcaccatctggagaaaaaacgctgaaaacacggcattgtactgccaaaaagggtcaatggtcggtgtgagcggcagaatccagacgagaagctatgaaaagacagacggcgtaaaagtttatgtgaccgaggtcatggctgataccgttcggtttatggatcaaaaacagaaagagccgctggctgaatagcattctttttcctcgatttcccgcctttcagcgggccccgcaatacctccttcccactcgccagtcgaaagactggtttttttgtgcgggagctgaaaaatggttaaaaagaagtgatttcgcttatgaatacttaaaaacattgaatatattgagataaaaacttataattacttacagataagtgacgaaaaagggaatgaggacgtgtatcaagaagaaagactgattgcgataatggaatatttgaaacagcatcggcggattaccgctgaacagatatgttcgctgcttcatatttcaagagataccgcaagaagggaccttgtaaagctgaaagagcgcggggccattatcagaacacggggcggcgcgattctgccgtcggtgaatcaggaagttcctggctattcgggccggctgaaaactgtttctgaagagaaaaacaaaatcggcaagctggccgcatccctgatccataaaggagaccggatcattctggacacctcgacaaccgtgcaggcctgcgcggagcatttaaatgtcaccggctgcactgttattacaaattcgatcaatcaggccgatatcctttccgcaaaagagggaattgatattcacctgctcggcggaaagctccagaaggaacaccggtttttatacggggcttccgtcgtagaaaaactgggggattatcacgccgataaggtgctgatcggcgttgtcggcatctcggaaaacggtctgacgatacctcacgaagaagacggcatggtaaagcgtaaaatgatccgacaggcggaacaggtgattgcgctgagcgatcactccaagcttggccgtacgagtttttatcagtatgcagacctgcacgaggttgacctgctgattaccgatcggctgcctgatcaggatttttgcgatctgctcgaccggcacggcgtagaattgcttgtaactgaatctgaagaagaggatgaggacatgtgaaactgattgccatagatctggacggcacactgctgaacagcagtcatcaagtaagcgatgaaaatgagcgggctttaagggaagcccggcaagcgggaattgaaatcgtggtttccacgggacgcgcgcattttgacgtgcactccatcttcgaaccgctcggcataaaaacatggattatcagcgcaaatggagccgccattcatgctcctgacggcagcctgtaccactgtgatgcgattgcagaaacaagagcccgcggcattttgtcatggcttgaagagaatcaatattactatgaggtgtttacaaacaaagccatctatacgcctgaaaccggcaggcagctgctcgatatcgaaatggaccgggtgaaaagcgccaatccggaaaccgatctttccgttttggaacaggcggcttcagtgcaatacagccagtccggctttgcttacattcattcataccgtgagctctttgagaaagaagagcatctggatttttataatattctcggtttttcgtttgatgagcggaagctgaaagcgggctgggaccgattcagcggtcagaaagatctcacccttgtcagctctgccgatcacaactttgaactggcgtctcgaaacgcctctaaagggcaggcgctcaaacggctggcgcaaaagctcggcattccgatggctgaaaccgccgcggtcggtgacagcttaaatgactattcaatgcttcaggcggccggaaaaggcatagcgatggggaatgcgagagaagatattaaagagatcgctgatgccgttacattgacaaatgatcaaaacggcgttgcgcatatgatcaggaatttactgtgaaaggtatggcgatactgttcatgactggcgtgacgcattcatggcaaatgcggcgtaacagtaaggacgacataaaagaccggctcttcagagagagccggtctttttgcgtttaatgtgattgcgctgatgcgctgagggtgaataattcttcaagctcagcggatgacagctcggtaatccaattttcactttggataatctgatcgttcaatgtttgtttcgtttcgagcatggcatcaattttttcttcaatcgttcccgtcgtaatgagtttgtgaacatggacgaaccgttcctggccgattcggtaggcgcggtcggtcgcctggttttccaccgccggattccaccatctgtcatagtgaatgacatgattggcagccgtcagattaaggccggttccgcccgctttcagtgacaaaatcagcgtcgggtattctttcttctggaaccgttcgacgagagaatcgcgttcctgcttggataggcttccgtttaaaaactgaaccggttctccgaatgctttttccaggaggcgcttcatcatgttgcccatctgaatgtattgggtgaaaatgaggcagctttccccttgtccgcggatcgccgccattaaatcaagcagcttttccagtttgacggatctcccgtttaacagctctgtctgttcttccttcaaatagagcgcgggatgatcgcatatttgcttcaagcggccgagcatgctcagaatcagcgctttccgctgcatcccggtcagagaagccatatgttcaaatgtatctttgacaagctgttcataaagggatgcctgttcggctgagagcgggataaactctttttgttccagcttgtcaggaagattaagcgctacttcttcatcccgttttgtccggcgcagtaaaaacggccggattaactgctgaagctggttgattcttttttcgtcacggtctttctcaatcggcagcacatagcgtttatgaaagccggtcagactgccgagatagcctttgttcataaaatcaaagatcgaccaaagctctgtcaggcggttttccatcggtgttccgctcagcgcgatatgatggacgcctttcagctttctgatcgcgcgggactgcttcgtatgcgcgtttttaatattttgcgcttcatcaaggcagatggtgctccatgtcacggaagaaagctcttcctgatcggcgtgcgacaggccgtaagaagtaagaacaacatccgcgtcctgataggccgggacaaatgcttcccccttcggccggcgggggccgtaatgaagcatggccttcagctgcggcgcgaaggtctggagctcacgctgccagttgccgagcaccgatgtcggcgcaatgattaaggcaggcgctttttgccggccgctttccttcacatggagaaaataagcgatcatctgaatcgtctttccaagtcccatgtcatctgcgagacaggcgccgaagccgttttcccgtaaaaacagaagccagttcatgccatacatctgataagggcggagctggccctgaaacgcggcgctgacttcatgctccggcagatcccgggcatccgtcagtttgcggatcaggcttctgagctgctttgataattcgatcttgatcccggcaaatgccgatgagtcaatgatgtctgtgtcctcggctccgttttccccgtgatccatcagttcgcgcgccagcacgtcggacatgtggaggccctcagattccgctttttccatcagttttttcatttgtttaatgaattgaggatcaattttcacccattggccgcggatgttgacgagacgtctgttgtttgcgacgagctcattgaattcatcctctgtcagctcaattccgtttgttgcgaatctccagttgaaatcaagcagagcgttcatgccgacgaaggactcgccccgcggggaggatgacactttcgccttgagcatcatattgctgtcccggacaatctgccaccatgatgggagaagaatctccacacccatatcgacaagcgtctcactcgcttccgataagaagatccaagcctcttcttcagaaatcagcgtcgttcctgaatcaaacgaaagccagggaaccgttctgcggaagcggtcctgttcgcgcgcgatttttccgctgtatgcctgccacgcttttttcagtcccttcagtccgtcgaaaaaggtgatggagccggtttttttctcacgtaaaaacatttcgattttccagtcatcaccgtcgaaatcaggctcgtttaatcggagcccgacggtaaacggcgtcacatcgtcatgccagccgattccctcgagaaaatcatcttcatccaaaaaggagcctttaaacgtatgaacggccggtgagcgggtttcgatctgccgccatttttccagcaggtcatcattgtactgaatgtagtcctggaccgcggctgagaaccagtctgccgtaaagccctccagcaaaagctcgcggtctttgaagcgcaggacaccattttgccaagcctcataatccggaagaaaatcgccgtcggcaataaattcgtatatcgtcgaagccgcttcgattaatggttccgtttcctttgtcagctgcacggtgctgaatgaattgaacgagttttttccgagcagctcgacggtcatccacgggctgagcagaacggccggggtgccgatgaagctgacgtcttcaagaaacgttccgtaaaaggtggactcatgccattggaacaaatgagtcttcatctgactgagagtaagcggctgctccttctcatcatggcttgacagcgtaaatgtccaatcttccatttgttctacatgaatgaaaatttccttaagactcgccatcaatcaactttcctttctgcaattcttcttgaagggcgcgcagcctcttgtaacttgcgctcagccggctgatataccgctcccatacctgttgtttttttgcctttttataaagcgtccgcagttttttcagatggcgtgcagcctctttataggcgctgcggtttttttgatcgataaaaaaggccgccgcccggtgataggaggggatgagcgcttccggatcactggcggcaatttccttcaggatgtccttttcgatttcccagacggaaaaaccgacgaggctgtgaatctccacccactccgcgtaccgccgtttttcgtacaggtactggctgtattcggtaaaggtatagggaaggcagccggaagcaaaccgttcaaacagctgatcatcccgtgagtgccgcgcataatccgccaatagcgcaaacagctctccgataatgtcgcgcatttctttaaacggcttatcaagcttcgtatagttcacggcaagcggctcgatccggccataccatgttttcagccgtttccagtcttttttcgcggtgagttcaccgagccattgaaaggtatacggcagcgcatcaggagggaagcgggacatatcttcaaagacagattcatcatccttttgcaaaaaggccagatgaagccgtccgaaccgcacttccggtgaaaaacggcgcccgctttcctgtgcgagaatctcctgttcacgcgcgacccatttcggacggttcaaaagcgcgctccacatttcaccgaatacccggaggcgttcgtattgaaaaagctcttctttcacaagcagtctgcggagcaccggaggcgtccggtctaaaaaaggatcgagtgaaaaagacaaggcgtacgttttcagtctgtcaatggaggaataaattgtatccatcagctgttccacgtatggattgatgctgtaataatctttttcggcatccaatctgcctgactcaatcaaagtgaacatgtgaagccagacggcaagcgccgaatgaatctgatataagcttttaagctcgggttttttcggggcgtgttttttgagcgctgacagatagccgtaataaaggccctgcatcgtctggcttccggccggcgtccgcgcctcccacagcgagaattccgaatcaaaaaaagcgagccagcttgacagcgactcttcattcggcagcactttttcctgaaactgccggcggacaagctccctgctttcctcaagcttttctctttccagccaatgctcggtaaaggtaccgacccgctcgaattgggcatatacgtaaagaaaaacggccagcacgtggcggcagatcgcctcagacgggcatgcgcagccgcttttcaccatgaaaaataagttcagcgtgacccttacaggcacaacatcctgcacatatgcggaaatctctgtcggggtttgaacctgtatacgatagacggaatcctgccgatataaaatgagtgctttcttcatcagctgaacattgtcttcattgtaaggaagaagttctttaagctgttcagccgctgcgagcacatcttctttagcaatcatatcctgaagcatgattatcgctcctaacgagtcacaaaataaaaagattccaattcctctattatatcgcaacacatggcccggaaaaagtttttcctaaaaaaggacataaaaacccgaatgtgtcgaatgatgtattagagattgcaaaacagcacccgacagcatataataatcttgttttcaatttaatggaagccgaaaggaaacgaatgatgaagaaaacgaagttagatcaagaggagtttctgaagattttaatgcatgcgcacgacattggtgagcagtcctctgagatgaccacaaaagaaatgcttgagaatttgatttcttatattaaaaatggatatgcaacataaaatcccgcaggctcttggccgcgggattttttaatcttcctgtaacaccagtattttaagcgcttacaaagataaaacagattgaagtgattgtctatttttgtcgaattttgtcatttgaaaaggttagaaatgacagtttaaagctgtataatcgtaattggaaaagatcattggagggaatgggaatacgcggaaagtgatatggaggttatatgggagaatctacaagcataaaggaaatattcgcaatactgagaaagcgtctgctgtttatacttattattaccgcggcggcatctgccgcaggcggactcatcagtttcttcgctcttacgccggtctatgaaaactcaactcaaattttggtcagtcaatccaaaaacaatcaaaaagaagtccaattcaatgacgttcaaaccaacctccaattaatcaacacgtataatgtcatcatcaaaagcccggtcatcctcgacgaagtgattaaacagctgcatctgtccatgacttcgaaagagctggaatcgaaaatcacggtgtccagcgagcaggattcacaagtcgtgacgatcgccgtgagggatacggatgctaagcgggcggccgttatggcaaatgcggttgcagccgtttttcaggacaagatcaccgccatcatgaacgtggataatgtcagcatcctttcaaaggccgaagcggcggacagccagtcaccggcagagcctaaccgtaagctgaacatcgcgattgcgtttgccgccggacttttgggcggaatcggtctcgcctttttgctggaacatctggataatacgatcaagtcggaagaacagctggaatcgctgctcggcatcccgatcctgggaacggttacttcaatcagtactaaagacagcgttgccaaaaacttgaggatggcggaaaccaaacaagcggggggcggacgtgttgacgcgtaaaaaagacaaactcggaaaacgaagcgtgattgcgatgtctgagccgaaatccatcaactcagaacaatatcgcacgatccgcacaaacattgaattttcttccgttgatacggaggtgaagtcccttttgatcacatccgccggcccggaagaaggaaaatcgacaaccgcggccaaccttgccgtcgtatttgcacagcaggggaaaaaagtgcttttaattgatgcggatctgcgcaaaccgacggttcatttcaccttcaaattggataacggaaccggattaacgtcgctgctgttaaaacagatgccgtttcagaaagccgtcctgccggctgatgaagcaaacctggatattttaacgagcgggccgatcccgcccaatccggcggagcttttatcgacgggtgctatgaaagatcttctgtcagaagccgccgcagtttatgataaggtgattttggatacacctcccgttttggccgtagcagatacgaaaatattaggcagctacactgacggggccattatggtgatctcaagcgggaaaacggacaaggaaaaagcggccaaggcgaaagaagcgctcgattactgcccgtgcaagctccttggggccgtgatgaacgggaagaaacaaacgaaacactcggactacgcctattacggacaataatgtcataatgggcgcggtccattctttttaaggagggattgaaatatgatagatatccattgtcacatccttccttccatagacgacggcgcggcggatgatacagaaagcctgaagatggcgagagaagcggtcagacaggggattgatacgatcatcgcgacgccgcatcatgtgaaataccgctatgacacggaccggcatacggtcaacgaagcggtcagcctgttaaacaaacgtttgaacaaggaaggcattccgctgactgttctgcccggccaggaaatcagaatagacggagatctgctggcaggtcttcaaagcggctcgcttgtcccgctccataatacaaagtatgtgctggcggaatttccggcggatcatgtcccggcctacgctgaaaggctgttttatgaactgcagctgaacggatatgtccccgtcatcgcccatccggagcggaacagggaaattcgcgaaaacccttccgtcctatacagtcttgtgaagaaaggcgcggccgcccaagtgacggccggctgcattgccggagcattcgggcggaaagcgaaatccttttcgctgcagctgattgaagcgaatttgatccactttctcgcatctgacgcccataatctcggaccgagaaatttttattatcaggaggcgctcggcgttctgaaaaaagaagcaggggcggagctgatttacatgttcacggaaaatgcggcgcttctcgctgaaaacaaagccgtttataaggaacctccgctgcctgtggcccgccgtaagcgctggggtcttttttaatcgtcgtctccatcccgtttaaatgaagcgtaagcggctgttttgcaagatgattcttttatgcttatgcttattatcagcggccggcgccgttttttcctatcatgacctcaggctccggcattcagccggcgccgggatcatatgataataacggtaagctgcccagcagcaatttctaaacggttgggggaacacgatgaaaataacagtgatcggaacaggctacgtcggtcttgtgacaggagtgtctctttcagaaatcggccatgacgtaacatgcatagatattgacgaacgtaaggttgagcagatgagaaagggattgtcccctatctttgaaccgggtcttgaagatatgatgaaacgaaatatcggccggcatcggctggcatttgaaacgagctacgaaaaagggcttgcggaagcggacgttatttttatagcggtcggaacgccgcaaaaagaagacgggcacgcaaaccttacttatattgaaaatgtcgccgaacggattgccgaacatatttctaaagatgcgatcgtcgtgacaaaaagcacggttcccgtgggaacgaatgacaggatcagcgaagttattcagtcacggctgaaagcggacgtgaacatttcaatcgcctcgaatccggaatttctccgtgaaggttcagcgattcacgatacctttcacggcgaccgcatcgtgatcggggctgaagaccggcagacgcgggaaacgcttgaccgggttttcgggccgcttgcgattccggtatatcatacggatatcagaagcgctgagatgatcaaatatgcgtcaaacgcttttttagcggcaaaaatcagttttattaatgaaatttctcatatatgtgaaaaagtcggtgcagatgtggaatcagtcgcacacggaatgggattggataaacggatcggcaatcaattcttaagagccggcatcggttacggcggttcctgctttccgaaggatacaaacgccctcgtgcagatcgcgggacatgtggagcatgattttgaattgctgaagtccgtcattaaggtcaacaataaccagcagtccatgctggttgataaagtgctgaacaggctcggcggtgtgacggggaaaaccatcgcgttattagggctgtcttttaagccgaatacagatgatatgcgggacgcgccgtccattgtcattgcggatcgtctggcggctcttgatgcccggatgacagcgtacgatccgatcgcttcattccgggcttccgggctgcttccggctgcggtttcctatcgggagtccatagaagaagccgtcaggggagcggatgccgtcctgattctgacagattgggaacaaattaaacacttcccgcttgaagcgtacaaagagctgatggaaaccccggttattttcgacgggagaaactgccactcgcttgaggaagcggaacaggcaggcgtggaatatatctcaatcggaagaagagccgtcgtgcctcagactgattctgtcacttgaaaggccggcggaccgcgccggccttttatcatacaatcattagagacgaaggggatattaatcgtggaaaacacatggaaattgccgaagcaaatggaatcatcccgcagtctgctggaaacgtcagcacggcgctttatcaaactgcacgtcaaaaaagctggaacgggtcggtatgacagtaaaattgccggagacccctattttccgaaacatgaaccataccctgaagatgaaagcggcaggccgatgaagcttctcgctcaaatcaattttgcggatatgcccggacttcctgattttccggacaccggcattcttcagttttacatatcggtcagtgatgacgtatacggtttgaattttgacgacgggtgcgcgcaaacgggtttctgcgtcaaatattttgaacatgtgacagcagaagaagcggagctcatggacgatttttctttcgttcaggttgaagaggagtacgattttccgattcaatccgaagcgctgatcacccctgagctgtctgctgaatgggtgctcccgtctgattttcaattcaggcagtatgccgggatggatgcctttgactatttcgagctgtttgacgatgaggtgtatgacgaatatacggcgaacgcattcggccataaaatcggcggctatgcgtccttcacccaggaagatccgcggccttactcccatcaaaaccatacgattctgcttttgcaaattgattcagatgatgacattgattcgatgtggggagatgtgggaatcgccaatttctttatcagaccggaagatttgaagaaaaaagatttctcaaacgttttgtacaactgggactgcagttaacgacagtatgatgatcatgatacaaggcaaaggagacggttaatcactgtctcctttttttagggaatttatcatggatacatagaggagatcaatgaatggatatgccggttatgtgagtcttttggcgttaatgatgaacatctcggctgctgaaaataagccatttaacctatttaagctgctttctgtctattttaaaatataatatatggaaatatagtatggaaaagtctgtgctttttgtacgactttttgcgtaagacgaggtgaaaaagatgagccattcaagcacattaagccatattaacagcacaatcagccataaactgggcgaggttgaacaccaaattgataaattaaaagaagcgaaaagagagatagaatctctgcaggaagagggcgtgtctgaaatcagggacatcctcaggccgcacctggatcatcattggaccggcacttttgctgaagaatttgatgaccggcgcgatcaggcccatacagaagcatacagaatcgttacagacaaatacgacggttatatttaccgaatcggcttaaagatgacacagcttgaaattgaaaaaggagggctccttgccgccagaagcatcgcgagagaggcagagcacctgctgacgctgggagaagaagcccttgacacagtcggagaaaaaatacaatcaatcaaaagaagctggagttggttttaatggcagaaataaaactcaaatacggagctgtcatgaagcagcttgaatccgtcagcagcgctttggaggccgtttcgatcgggaacgccggttcaaacggaaaaaacaagctcgactatacctccaaatatcaatcccgcgaggcaaagcttgtatcgatgatcagcgaatacaagcaggccgttcataagaatatcgcggacgttaaagacaacgtagattctttgaaagaacaggacgaggcgatcgccgtaaaataacgaaagaaaggacttgccgatgagcaaagtgtttgaatcacaatcgttaacggacgaagcagataagagaaagaaacaatacgaagcccttgaagagcagctgcgtgcgctcaaacaagcctttcaaggcatggccgatctgggtgatgctttgaaagggaaaggcgcagacaatataaaagatttttttcagggacaagcggaaatcgccgacagctggctgacgcttgtctctgctcaaattgcgtttttaaatggcatttcaggtgacattaaagatcaagaactcagcgatacatatgcggagacttcatttttggagcatgagctgcccaacgcggatttgaaagcttcagagattgtctccgctcataaagcagaaatcgattcaattttgtcaggcatcagcgatattattcatctcgacacatatacgctggatgattacgctgataaaatgggcgatgcccagaaaaccagacgcgacacgatcacggcagttgatacgcttgatgaatccctgactgctgaatatcaaaacttagaatctctggacaacgcagtgctcagcaaatattccgttctcatgcaggccaccagcaacgggaaaagcgcatcccctatgtactatgacaaaaaagccttccacagcaatgaaatctacaaaagcgtcatggcgacagaaaaacaggggacggactatattgacgcaaaagcccagcaggccgaagcaagacggcttcaggaaaaggctgaagaagaagccaataaaccatggtacgaaaaaacatgggacggcatctgcaactttaccggcgaagtcaccggctattatgattataaaagagcagccgaaggtgttgatccggtgaccggcgaaaaactctccaccgcagaacgcgtcacagcaggagcgatggctgccgccggattcataccggtcgtcggctgggcgggccgcgctttcaaaggcggaaaagccatttacaaaaccggaaaaaccgtcattgccgcagaacatgctttagatgcctataaaaccggaaaatccttagacattctcaaaatgacagaaatgggcgcatacggtcttgtcgcctcaaacggattcacagaagccgtcacaggccgggatatgttcggaaacaaagtgtctgaggagaagcggaagcaaggggcgctggaagctattactatgattggtggagcaggattggcacactactttgagcggttgtaccaaaaaaatgctccatatgtcaataaagtggctaatgaaagccttagtagcaatattgctaagactagtgaagaaaaacaaactaggcttcaatatttaagaaataagcatggtgtattgtctaaagaagatcttcaccatcgaataaatctaagagcagaagtgttaaacgaacttagtaaaattaaatcatctggtttaactaaaaaacaaagaggtcctgcggtagctggtgtattggacaaaaaaacaggcaagtattattttggaattaacaatatagatggggagccacctaaggtactacatccacttattcatgatagaatcgtaaatatgcctgcagaacttaaggaaggttatataaaaacatcaggggctggttctcatgccgaagttaatgcgctaaatgaagcattactacaaagacctgatgcggaattaaaagaattaatggtatacgtagtaagtgcgaggaaaataaataaaaagatgccagaaggtgtcccaatgcctagatgtccacattgtgaatatataactcaaaatacaaattatataccggaggctttaaagtatggaaaatgaatatgatatgaagaatataaaagaaataggagtggactttgaggatttatggttctcttcggtcagtgatgagatactagataatcctgaagacgaaaatggccagccgtttacagggctggcttacgaattatatccaaatggacaaatcatctattttactaaatataagaatgggctggctcatggtttaacaagtgaattttatgaaaacgggaataaaaaaagtgaaaaagaatatagatatgggcaattgcatggtaaaagtataatttggtttgaaaatggaagaaaaaaaagtgagcaacagtatgagcattccatactaatttgcgaaaagagttgggatgaagaaggcaatctattaaatcagtatgagctagatacaagtagtcctcactttgaaatactagaatcgagaagagagactcacattaatttaggtcgagagtgatcaatcgttatgaaattatttgatgtgcataattttgatatgaaaaaggaacaagattttttacaggtccaatttaaccttcaaaatcgtatcaacctatcccccgtcatccatccagactccgtcaacacatgcgcaggcgtcgacctcgcttattgggagcaggacggggaaccgtacggcgtatgcagtatcatcgtgattgacgctgatacaaaagaagtgattgaaaaagtgcacagcatggggaaaatcagcgtgccgtatgtttcaggttttcttgcgtttcgcgagctgccgctgatcattgaagcggccgaaaagctggaggcggagccggatgtgtttttgtttgatggcaacgggtatctgcattacaatcatatgggcgttgccacccatgcggctttttttctgggtaagcctacaattgggattgcgaaaacctatctcaaaatcaaaggctgcgattttgagatgcctgaaaatgaagtcggcgcctgcaccgatattctcattgacggcgaggtatatggccgggcgctgcgtacgcggcgggacgtgaagcctattttcttgtcttgcggacataacattgatttagaaagcagttatcagatcacaatgaaaatgatcaatcgagaaagcaggctgccgatccctgtccgtctggctgaccttgaaacgcatgttttgcgaacgttttatcggaaaaatcacgtgtaacacttggggctctaagccaccaagtgttttttttgtatgcctctggtgtctgctttgttaaaaactttgtcgtccttgcagataggtttttatttgaatgtttttcgcgtcaaatcgataaaagcctttaatggcgcagacatccacttgtccttatgccatgctagttgagtaaaaacagggcattcattctgccagttgagttctttcatccgtccttcggcaatatcgtcttttactgtcatttcaggcaatagtccaattccaagtccggccatcacgcattgtttgatggcttcgatgctgacgaattctaatttgttagggtagactccggcgtcatgtaaagtgttctcaaagagcgtgcggtatgaacagccgtcctctgtcagcagaagggtttcattttgaagatctttcaatgttgctggtgagtctgctgaaaaaggatggtcattggcggctaccattttgatttcatcctgaatcaaagattcaacgtgcagtgcgtcttccgttcggttcacatccaaaatgaaagtgatatcaagctggccttgtaagagctgttctttcgcttgttcgttggaaacatacggtttgaatatgagctttacttgaggaaaagcctgtttgaattcttttatgataggcggaaggcggtatgtgcactggctttccgtcgcgccgattttcaaggttccggttgtttctcttacttgatttgcggccatttttgcttcttctgttaacgcaatgatcttctccgcataggatttgaacgttttaccggcttctgtcaggatgagccgcttgccgagccgttcaaataaaggagtcccgatttcttcttcaagtgatttgatctgagaggtaacgcttgattgtgcatagttaagcatcttggcggttagggtgaagtttacatgttctgctgcggtaataaaggtgatcagctgcttcaattccatatgttctcgccctttctaaatcggttttaccgattggaataatcgaaataatcatctgtattgattgatgaatccattatatgatgaagaaaatcattcgtaaacaaaggagcagatgcatcatgaaaattgcggttattcatggcggaacgaggtctggcggaaatacggatattcttgcggagaaggctgttcaaggattcgatgcggagcacattcatttgcggaaatatcggctccagccaattgaagatctgcgtcacgctcaaggcggctttcgtcctgttcaagatgactgcgattctatcattgagcggatattaccgtgcgatattcttgtattcgccaccccaatttattggtttggcatgtcagggacattaaagctgtttattgatcgctggtcacagacgctgagagatccgaggtttcctgactttaaacagcaaatttcagcgaagcaggcatatgtaacagcagtgggaggggacaatcctaaactaaaagggctgccgctgattcagcaatttgaacatatttttcattttatggggatgtcctttaaaggctatgtgctgggagaaggcaatcgtcccggtgatattcttcatgatcatcaggcgctgagcgcggcgagcagcttattgaaaagaagtgatgctctatgaagctgctgctggttatctctggtatgttgattctcgcactctttttagcttggaaagcgccgacttctgtttggataaaggctgaaaccaattcgcctcaggttcagcaatttgtgagaatggcaggcgcaacgctgcaagttaagcaaatcatcaagagtgatgcaggcaaagaaacagttgtcatatcaaatggtatttccgggccaaaataaaaaagcacctgtccaggtacttttctttataaatgaggaaccacaagacctccatacaaaaacgccgcgataatcaggaaggccggatgcatcttgaattttgtcaaggcaaggagggaaatccccgcaatcactatcgcttgaacccagccgatcgctttgatgccgtctgcgccgatttgccaggtaagaataagcatcatgacggcgatgacaggctggacggacagcgtcatacctttgatgacaggggattggcggaagcgctgaatgatgcgcaagaggacgatcaatgcgagcgccgacggtacgacggtagcgatcagcgcaatcaggaacccgggccacccgcctgcgctgtagccgacatacgccgcgattttggttgcgatcgggcccggcaatgcgttcgcaagtgcgagcatatttgagaactgatcgtttgagagccagctgtatctgttgacgacttcttcaaacatcagcgggatcgacgccggtccgcctccatatccgagtacgtttgcgacaaaaaacgccataaataaatagatcatgatcatgaggccgacattcctttatcttttgaacgtttatttgtgattttgtcctttaatttaaaatgaaacgcgccgtacgccaagaaaatgataatgacaaagccgggattgatctgcagcgtttgcaggccgataaaagcgatgataaaaaacaggatgcccgtgacccagccgaaacctttaagcgctttttggccaaactcgtacgccataatgccgagcattaccgcaatcaccggtgttacagcgccaatcatgccggcaataattgctgagtggcttaaaacattgacagccgcaaacaagcccgccatagcaaggcatgtaggcagaatgtgggcgagggttgccaagattgcgcctaacgtgcctttcagcttgaagcccagatacgcagccatttttgtggcaatcggtccgggaagtgcattagcgatcgctaatatttctccgaattcatcatcatctatccatttgtatttattgacggcttcatggcggatgagcggaatcaccgacgggccgcccccgaatccgagaatgcccgttcggaccatcgccgccgtaatgtcccaatagggatgtttcatggctatgtcctccttacagcttcatgcccgttctgcttttataccgtttaatcagcatttggcagtcgacgctgacgacgcctttttgcgtatagagccgttttgtcaaaaactcttccatctcctgatcatttgcgaaaatgccgtgcatatgcagcttgctcggtccggtcatatgataaaggcttgtcacggccggctccttttcaagctttaatgcggtttcctccaaatactgcggctccacctccacattaaaaaacacggacacatgacggccgattttcgccgggttgatgacagcggtgaatttttcaattacgccggcatccagtaaatgctgaatgcggtgctgaaccgccactcgcgacaggttaacccgctttcctacgtctgtataggaaatcctcccttcctcgtgcaaaatcgaaagaatctgtttatccgtttcatcaaggacaagattcggaatgctgtattcatgttccaacccgcttcaccttccttcatttggtagacattattgtatcatgaaacattacggtatgaagggagaaattttttattgttttcgatatgtaataacttagaatcatttcttatcgaaaagtaaatagtgtgtgagattttctttcaggaatgtggatggccgcgaagccgctttttataattgagaaaatttgtaaaggggcttgtcatgaatacttcaaccatcggaacgaaacaaatggtcgtcagtccgcattatctcgcttctcaggcgggggccggcattctggaaaagggcggaaacgcgtttgacgcggcagtggcggtcagcgcctgtctggcagtcgtgtatccgcatatgacgggtcttggcggggattcattttggctcacttaccataaagaaacgggacgaatcaaagcttataacgggagcggacgttcagggaagcatgtgacgagagacttgtatcggggcagagaagcgatccctctgcgcgggacagaaagcgccattaccgttccgggcatggcggacagctgggatgccgtgctttcggcgtacgggcgtctttctctcgctgaggtgctgaagccagctcttgattatgcggcaaacggatttccggtgtccgccgaccagtgcgtccacacagaacgcaatctcgctcttttagcctcgacgccttacacctcggctatttttacgagaaacaaaaaagcgcccatgcccggtgaacggtttgtccagaaggatctggcggccagcttggagcagcttgccgagaaaggcagaagcgctttttatgaaggagatctcgctcaacgcatcatatcctttctgcaaaacaacggcagccgtctgacacttgatgactttaaagcccaccgcggcgagtggacgaacccggtatcctccgattaccgcgggtgcaaaatctatcaggctccgccgaattcacagggctttacaggcttaatgacgctcaatatattggaaaactatgatttttctcagatcgaacacggttcctttgactattatcatctgctgatcgaggcgctgaagaagagttttcagcaccggaatgaagtgctgactgatccggcattttctcatattccgctggatcggctgcttgataaacggtatgcaaagcagcttgcggaagaaatcggtaacgtggctgcgccggcggtaagccggccggtcggaagcgacacagcttatgccgccgttgccgatgcggaaggaaatgccgtttcctttattcagagtctctatttcgagtttgggtctgccgttacagcgggggagacgggcattctgctgcaaaaccgcgggtcatttttttcgctggacgaatcccatgtcaatacacttgaacccggcaagcggacgttccacaccctcatgccggcgatggcctgtaaagaaggaaagcctcacatcctgtacggaacccagggaggagaaggccagccgcaaactcagacagcgatgattacgcgcatcattgattacaaaatggacccccagcaggcgatcaatgagccgcgctgggtctggggacggacatggggagaggagtatgaagggctgagggttgaaagcagaatcagccctgaaacgagagaagccctaaggcagagcggccaccgcgtcgagaccgttggtgattttgacgggcttatgggccatgcggcagcgatcgtcattgatgaagaaggctttctccaaggcggtgccgacccgcgcggcgacggagcggccgcaggagtatagagatacgctaactgatgaaaaaaataagcacgccaagcgcggcagaaagacccgcgtaaaacgaatcgtacacatattgcttttcctcccgccggtgccgccattccattatgccggtgcagcaaaatagcatgaaaacaactcccgcaaatacgtacatttcattgaaaaaattcaccgctgcgatgcccgtaataagcagtgtgatttcgattaatcgatgtgtgccgtttatcggcttctgctttttaacaggctttggcaaattgagaactttgacggcaaatacttgaaacataaggctgagcaaaataaatacggctgaaaaaatcagtaactgtctgcctcctaaaaatgtgtcactcgtttcatacgggtgaggagcttgtaagtttcgccattctataagacataaggctgagtttaatggtaaaagactcaaaaagacccctttagaaaggggtctttttgactagtttcttctattataatggttcctgcttcaggtcgggcggacaagcgtatatgtcttcccgagtctggcgtattcattccccgcgagccttgccgcaggcttcagctcatctgtccgtatgtagcctttatcggcgtcatatacttggtcattcaaatgaaaacaaacgactctgccgatgatgaggtctgtcgtcgtttctccgctgtcattttggaacgtaagatggcgttcgagtatacattcaaacctgacttttgcttcttttataccgggaacgctgatgcaagcgctgtctgtcacagaaaggtctgtcatgccaagctcactgacatcaggatcaagccttgccgccgttttgttaatggcttcaataatggattcatcactgacgtgcaccacgaattcccgatgagcgattgcgtttctcgcggtgtctttctgccgtccgtccgcgcggctgactgagatggccagaagcggcggttccgcggagacaacgttatagaaactgaagggcgccgcgtttacggcgccgttgatggatgaccgcgtagtgacaaatgcgatcggccggggaacgactgtgcccgaaagcaatttgtaagtgtcttttgcgttcagttcgtctgctcgtaagatatgcatgatttcggccgcctttctttatcgtatgacctgattatacagaaagaaaattcggaaacacaacaaaagaaaaccggctgcatatcttatcacgtggcatatatctgattgaggaaaaaggcttccgtttagccggcagcctatttacgaatggtgttacttgtagtttttctttacaacccagatgttcccgtctttccagtactctgttttgctgcagtaatcgtcttttttgcaagggtcttttttatgaggacgataagtttttttctgcgtgcgttttttcttgcggcggcatgattttttgtggctgcgagattttttgtgagagcggcaagattttttacggctgcgagattttttgtgagaacgggattttttatggctgcgagatcttttgtgagaacgggattttttatggctgcgagatcttttgtgagagcgggattttttatggctgcgagatcttttgtgagagcggcacgattttttatggctgcgagattttttgtgagaacgggattttttatgcttgcgagattttctcttcttactgctttttggttcttgatacaaataatcttccaatccctcggtgcttgcggactttactgcttcttcgatatcagaatgggaatagtggcccattttgaaacctcctcatgatatatgttttaaggatgcgatccttactaccacatagtacgcatgaatgaaaaaagtgtatgtgtgattcgctgagttttatataaaaagcacagcctaaattaatacagggagggttactgatgaaagaccaatcaacattgcctctataccagctgtttattcacccgaaagacttaatggagctgaaaaaagacatttgggatgaggatccggtgcccgcggtgctgagagtgaatcaaaaacggcttgacattgatctggcgtaccgcggctctcatataagagatttcaagaagaaatcgtatcacatcgctttttattcgccgaaaacatttcgcagggcgaaagagatacatttaaacgctgaatacaaagatccgtcgatgatgcggaataaactgtctctcgatttcttcgcggagcttgggacgctgtcaccaaaggcgaatttcgtaaccctgcaaatcaatggcagacatgagggggtgtatcttgagctggagtcagtggatgaatattttctggcgaaacggaatttggcggacggcgctgttttttacgcggttgatgatgacgccaatttctccctcgtcagtgatctggagcgggatacgaaaacatcgctcgaacttggttatgaaaagaaaacgggaacgaaagaagacgatttatacttgcaggatatgatctataaaattaataccgtgccgaagtcagagttcaagggggagatcgtcaaacacttggacgccgataagtatttgcggtggcttgcgggcatcgtgtttacctcaaactacgatggatttgttcataattacgctttgtaccggaatcatgaaacgggactttttgaagtcattccgtgggattacgatgcgacgtggggaagagacattcatggtgatcggatggaagccgattatgtcagaatacaagggtttaataccttgactgcaaggcttctggatgaaccgtatttccgcaaagcgtacaaacagcttttggaagagacgcttcagacccggtttaccattgaacatatgaagccgaaagtcatgtcgctgtatgagcagatcaggccgcatgtcgcgaaggatccatataagaaagaagagattgattgctttgaccgggagcctgaagtgatttgcgaatacattaaggagcggtccgccttcatcagcagtgagttagagcggtggaatatctgatttggagatgaagaaagattttttacaaataggctggtgaatcagttcccgaaaataatcgtgatacgtatatatgcattatgctttttacattatgagaaaaatgactaggaggacaatagatgaaacgcaatacgaagcggcagcggtctgatgacaactttttgcatgcgatggaaggaaaagtaattactgtctaccggggaggcccggagtccaagactgggagattagcagacattcaatcggattatatcgctcttcaggttgataataaaatcgtttattatcaatggaaacatgtgaaaagtgtgacggaaaatacgagtgaaaccgtatcgccggccgaagcggcagaatgtgaaaaagctgatgattttcaagacctgatcagccggatgaccaatcgcacggtgcaattgaatcagggaggtccggaatcgaaaagaggaaagcttcacgaaacaggggatgattttctcgtgctggaaacggaagatgacggaattgtatattttaacgccgaccatgtcaaaagcatcagcgcggaacaagaagaggacggccaagaggaggagcgcccggaatttgaaatggctgatgattttcacggcatatttaaacgcctgatccacaaatgggtatccatcaaccgcggaggtcctgaagccgttgaaggtatacttgtggataattccgacggccactacactcttgtgaaagataaagaagtgctgcggatctatccttttcatatcaagagcatcagcgaaggggcaaaaggagcagctaaaaaagaggagaataaagacgacgagaataaaggtgagaaagagagcgccgaagaagaaaagccgcatgaagaagaatcacgcgaagagcagcgtacttcctctaaaaagtcgaaaagatcatcaagatccgttcgatcctcaaaacgggagaaagaaaactcttatagctacgccactgtattaaggacaatagattatcggtggaaacacggccgtaaatgattggaaagattgtccgtaaacgcgggagaggggggattgaaatggctggattaagcagatttctggataaacaggtcgatattgagatatcggggaatacgacattttcaggaactcttttggatatcggtcaggatatcattgtgatgcatgacggccggacgtttctttatattccgctgctgcatcttcagaggatgacattgacgctcccggacgaagagaataaagaaccgtacgcaagaaaaaaaagtccgcatcccgaaaaacaggaacattccttttcttaccggaataccctccagcatataaaaggcagattcacagaaatatttgttacgggagaccgttccattcatgggtatgtgacaagtgttttaaatgattattttgttttcttctctccggtttataagactcttttcatctcgatgcatcatttgaaatggctgacaccctattccgatgagcagacgccgtatacgttaaacagttcagagctgccggttgttcccgctaatgtgccccttgtccggaattttgaggagcaattaaaaagatatatcgggaagctgattattctggatttaggagatataccgaataaagtggggctgttacaggatgtctcagataatattcttgaactgaccaatgcagacggcgatactgttttttggaaattgaatcatttaaaaaccatgcacctgccataaatgataaaactgcctctcttatacagcaggcagtttttttcatgggagctaaaggtaaatccaactgatccaaacatataaaacggtaatggtaaacacgacggtgagagggacaacgataatggtcgttttgatatattctgaccaagaaactttttcgccgtgctgtctgatgatatgcatccagatcagcgtggctaatgtcccgatcggcagaagcaatgatccgatatcactgccgataatattagccagataaatgatttttacggttaatgggtcgatggacatttccgttaatgtcaaagtgctgatcattaaggcgggatggttattgaacaaattagagaggacggatgtagcaatgcccataatagatgcagcgtgggcaatgctttgcgagacataaggctcaatagactgaacaagcagcgccgtcagtccgatattatgcagtccgtagatgataatgtacattgtgaaggcaaaaataaagatatgccaaggcgctttccttaataagtctgccggtccgatttttaaataaaaccatctccagccaagcaggatgactgaactgatgacagccacgagcgaaacggatatgccgttgtaagaagctgcaaacagactgatccggacgaacaatacaaataacaaaacacaaaacatgatgttcgtacggctgttttgggtcaggtctggcggaggctgaagcggatgatatcgtttgtgctccagcgagtcaaagtgaactggaatgtcggggagctgtttcggcaaacggcggtaaaaaacggcaaacagcagaaaggccataaacaccagtcccagcgtgccggggataaacatcatattggtgtacaaataaaggtccatgcctatcattttgagggaaattaaattgacgatattactgacgccgatcggggtgcttgcggccgtcgcaattaatacgccgcttattaaatacggtgttttctgatgtcttttaagtccgagatattgtaagaccaatagtaaaataggagtggtgattaagacgctgccgtcattattcagaaaaagcgtcattgaaaaacagagcaggttggtcagccaaaaaagccggatgcccgatcccttggcgcggtgaagcagtttggccgccgcccagttaaaaaaaccgaagctttccagcgcgattgccataatcattgtggagataatggtgattgatgctccggtgacttttgaccctatatcccctaaatcatgaaaggaaacggttccgcataacaaaacgagaatggcgcccagcgacgccggaacggcttcatttaatcccccgggtctccaaaatataaaaataatggtcacaaagaaagaaatcagggtcaaaatgacggtaatatgtgtaatgtgtcctgcctccttttagatgggtcattgccgccccgttatttttatccctcctgatcagttgtactgtatgtatacgggtacaggtcgtaaggtgtactgagcgtttctaccaatttagtaaaaatccataaaagcacaaaaaaaagaggctgctttcggcggccctcttttttatgcattttccttatccgcctgcaataaagcctggcgcttattcataatatccagaaaatgtttcagaatcggattttgattatccttgcggtaggcaatgacccattcggccgtgagctgcacctgattaatgccgcggtaggcgacttcgagattaaacagctttctagcagaagaaggcacgaaggttacgccaatgccggcactaaccaatccgatcaccatttgatactccgtcgcttcctgaacaattttcggtttgaagcccgcctgctcgcagtagtttacaaactctaggtataaagtcggccatgtttctttcgacagtgtgataatcggttcattttttaaatcctgaatgtcgattgtctgtttagcggtaagcgggtgctgcttcggcaaagccagaatgcacgggctgctctgcaccttttccatatgtaacgcggaatgctgtaaaggcggatgaaggatgccgatatcaatgttccccttcagaagttcttcctgctgtctgaaagaagaaatttcacgcagatcaagcttgacggaggggaatttttcgcggaattcccgaatgatgggcggcagaaattcatatgtggccgagccgacaaaaccgacgacaaggcggccgagctctccccgcgccgttctctgcgccatttcaatcgctttgtctatttcttcgatcgcgtttctgctgtgttttaaaaaactttccccggcagctgaaagctctacaacccgtttcgtgcgctttaataaggtcacgccgacttccttctcaagctgtttgatctgctggctgagaggcggctgtgtcatatttaaccgaagcgcagctttgccgaaatgaagttcttcggcaacggcaataaagtattgaagatggcgaagctccatccttatccattcctttctctttgttaattattcgtgaaacatattaatcatacggcgaattgatattggaggtcaatttccaaagagtgtatagtgaataatatcacaaattacttaaaattttatatttaatatgcataataaggagtgagggtgttggcaaaagcaacaaatgaactaaaaacctctggaaaaaatcggggggcggagcttgttgttgattgcttagtggagcaaggtgtcacacatgtttttggcattccgggtgcaaaaattgatgcagtatttgatgcgttaaaagataaaggacctgaactggttttatgccgtcacgaacagaacgctgcatttatggctgcggctgtcggaagactgactggaaaaccaggcgtttgtctcgttacttcaggcccgggggcatccaacttggcgaccggcttgttaacggctaatacagaaggtgatccggtagtggcgctggcgggtaacgtaattcgcgcagaccggttaaaacggacacaccaatcattggacaatgcggcgctatttcagccgattacaaaatacagtgtagaagtacaggaaacagggaatataccagaagcggtaacaaacgccttcagggcagcgtcagcaggtcaggcaggcgcggcttttgtgagctttccgcaggatgttgtgaatgaaatcacaaatgtgaaaaacgtacgcagcgtgccggcgccgaaacaaggccctgcaccggaagaagcggtcagcgcggctatcgcgaaaatccagacggcgaaacttcccgttctgttagtcggcatgaaaggcggtagaccggaagcggtaaaacaaatccgcaaactgcttgccaaaacaaaactgcctttcgtagaaacgtaccaaggggccggcacattgtccagagagctggaagaccaatatttcggccggatcggactgttccgcaaccagccgggcgatcttctgcttgaacaggcggatgtcgtattaacgatcggttatgatccgattgaatacgatccgaagttctggaacgtaaacggcgaccgtgctattatccatcttgacgaaatccaggccgatatcgatcatgcctatcagccggaattagagttattaggcgatatcgccgctacggttaaacaaattgaacacgacgctgtgacatttgatatgggcagccgtgaacaagaagtgctgagcgaattaaaacagatgctcacagacagcgagaaggcgccaagcgaccataaatccgacagagtgcatcctctgcaaatcgtccaagaactgcgcaatgcaattgatgacgacgtaaccgtcacttgcgatatcggttctcacgcgatctggatgtcccgctacttccgcgcttatgagccgctgaaactgttgatcagcaacggcatgcagacattgggcgtagcgcttccttgggcgattgccgccacattggtgaatccgggtgaaaaagtcgtatccgtttcaggagacggaggattcctgttctctgcaatggaattggaaacggcagtccgcttaaaagcgccgatcgttcaccttgtatggaatgacagcacatatgatatggtcgctttccagcaaatgaaaaaatataaccgtacatcatgcgtagatttcggaaacattgacatcgtaaaatatgcagaaagcttcggcgccaccggcttgcgcgttgagtcaccggaacagctggcagacgtgctgcaaaaaggcttgaacacagaaggccctgtcatcattgacattcctgtcgattacagtgacaatgtccatttatcaagcgacatgcttccgaagcaattcaaagaaaaaatgaaagcaaaagctctctagcactctgcgcaccatgacctgttttctaaaacagcccaatttaaaaggagtgaagggaatatgaaaaacgcaagcgacatccatatgatgagccgcggagaaaaaggctcacctgaggatcagatctatcaagtatccacaatgacatctctgctggacggagtatatgacggagattttgatatggctgacattccgaagttcggtgatttcggaatcggcacgttcaacaaactggacggcgaattaatcggatttgacggagaattttaccgtctgcgcggcgacggaacggctactcctgttaaaggcggagacctgtcaccattctgctcattcacatttttcacgccggatatgacgcatacgatcgacggcgaaatgacccgtgaagaattcgagcaggaaatcgccagccttctgcctagtaaaaacttattttatgcgatccgtttagacggcgtatttaaaaaggtgcagacaagaacggtagaacgccaggagaaaccgtacgttccgatgatcgaagcggtgaaaacacagcctgtgttcaactttgacgacattcagggtacaatcgccggcttctggacgccgggttacgcaaacggcatcgctgtttccggatatcacctgcacttcattgatgaaggacgcaattccggcggacacgtgtttgactatgtcattaaagattgtaaagtgaccatttctcaaaaaatgaatatgaacctcaagcttccgaatacggcggactttttcaacgcaaatttagataatccgaattttgcgaaggatatcgaaacaaccgaaggaagcccggaataaataaaaaaagaaagcctcatttttctcggggctttctttttatttggctgaaccggcaaagattaggtaaaatacagtcaaaagggaaaggtgtggtagctgtgaaagtattggtattagcggttcatcctgacatggacaactcagcggtcaataaggcgtggacagaagaattaaaaaatcatgatgaaatcacggtccgtgagctttataaagaatatccggacgggaaaatagatgcggaaaaggaacggcagctgtgtgaacagtatgaccggatcgtatttcaattcccgctgtactggtacagtgcgcctccgcttttaaaaacatggatggatcatgtgctggcgtatggctgggcttacggttccaaaggaaaggcgctgcacggcaaagaattgctgctggctgtttccgtaggtgccggagaggatgcatatcaggcgggcgggtccaaccatttttcactgagcgagctcttaaggccgtttcaggcaatggctaattttacgggtatgacctatttgccggctttcgcgatgtacggggtaagcagcgccgatgctgcggctatccgtgacaatgccaaacgcctggcggattacataaagaagccattttagagtcgtatgcattcatcttcatccgacaatatttcctgagaaatatttcgaaccttagacgtttctgactgctcaagaaagaaaaaacggatttcgcgctgaatttgcgaaatccgttttgatattatgtcagtttttgcagatcttttgtgctgatatatcccgtggcgcccccgtaatcgacaagcgcccagccgaagtcaatgccgccgccggctgtctttttccatccgaggaaagaaacgctcgtgtttttagcaagggaagctttgaccgcttgtttgtctgtatatacttttgtttttgccgtcgtttttacggttgttgcttctttaacaatataatgagtagatacaaatcctgtttttccgtttttataatgtacttttgcccagtcagcgttctggaatgaaacgatctttaagctgtcgcctaaatgaagggtatcagctctcggactggctgctgatgcttttgttctgacgttcaatgcttccgcggaaacgagataagagtcaagcgggtagctgtacagatcgtcaattttgaccgcttcttgcgcgtgtgtctccggaagaggcgttattccggcagctgaagccgctgttattcccgctgcaagggtcagaatggatgccgctttggctgttttcttcatctgtatctctccttttacttcatcctttcacgttttaccggaagtctaaacatcggccggttatttttgtgtttgaagtttcaatggagcggaaatggtttttttgactttttctcctttgagcacctgctccgccgcttcggccgccagttttccgatcagctccggctgctgggcgaccgtggctgtcagctttccgtttttaatggaagaaatcgcatctttatttccgtcgaaaccgacgaccaaaatgtgtttgcccgagctgttaatcgcttcgagcgccccgagtgccatttcatcattatgggcgaacacggctttgatatccggatgtccctgcagcaggttttccatgacggtcaatccttttgtacggtcaaaatccgccgcttgctttgttacgacatccagctttttgtcggcaatatgatgaaagcccgttccgcgttcccgtgtcgcggatgcgcccggaaccccttgcaattcagccactttggcgccttttccgagctgatcggcgaggtagtcagccgccatttctcctcctttgacattgtcagaggcgacaagcgtttcgactttgccgtgttcggctgaacgatcaagcgcaatgacaggaatgccgagggaatttgccgattcgacggctgttgaaatcgctgatgaatcggtcggattgatcagcagcgcatcgactccttgctgtatcaaatcttctacgtcatttgactgtttagatgaatcattttgagcatcgacaataatgaccttcatgccccgttttttggcttcctttacaacgccttcttttaatgaaacgaagaacggattgttcaatgtggagacggagagcccgatagtgaattcttttttatgttttgtgtttgacggttttgcccattgtggcggttcaagtgaacaggcggacagcaaaaacagtgataatgccgcgatcgtgatgatggctttcttcataatggtcctcctactatgccgattttttgcggtccagcagcaccgcgattaaaatgacgattcctttgacgacgagctgataaaaagatgatacgccgagaaggttcaagccgttgttcagcgtaccgataatcaaaaccccgatcagcgtaccgatgatgcgccctcgaccgccggacaggctcgttccgccgagaacgaccgccgcgatggcgtccagctcgtatgattccccggccgtcggctgtgcggaatttaagcgtgatgtcagaatcgctcccgccagcgccgataataaacctgtcagagaatagatcatgatcttgatgcggggcactttgattcccgatatcagcgccgctttctcattgccgccgatggcgtatgtccggcggccgaacggtgttttgtgcagaagaacccacagggccgcaaatgcaatcagcatcgttatggcaggtacgggaattccgagaaaataaccgcgcccgaataattgaaatgcgtaatttgaaccgagccccgtaatcggatttccgtccgtatagacgagggtcagtccgcgaaagacggtcattgtcgccaaagtggcgatgaaaggcgccatttttccttttgtgattaataatccgtttatcatgccgagtacggcgccgatcacgcagccgatgatgacggctaagatcgggtcgatgcctgataccatcatacctgcgaccaatgcgctcgataaggcgaggatggctccgacagagagatcaatgcctcccgttaaaatgacaaacgtcattccgaaagcaatcagagcgttaatcgcaacctgccgaagaaggttgagaatattgaggggttcaagaaaactcgggtttaaaacggaaacgatcagcacaagaatcagtaagccgagaaacggaccgagtttttgcgtaaaggtatgaatggaaaatcgcttttgttcagttgatgtcattggttcagttttcatactgctgccctcccgtggcaagtgtcatgatgtgttcttgtgtggcgccggccgcattgatttctccgctgatgcgcccttcgtggacgacgatgattctgtcactcatgccgagaatttccggcagctcggaagaaaccatgatgatggcgactccgcgatcggtcagttcattcattaatgaatagatttcccttttcgcgcctacgtcgacgcctcttgtcggttcatcaaggatgagaactttcgggccgattccgatccatttggcgatgacgactttttgctgatttcctcctgataaatgccgggcggcggtttcctgagatgcggtcttaatggtcagacgcttgatgagcagctcaacgaactccgcctcgcgttttcggtcaatgatgcctttcggagagaagctggtcaggttcggcaatgagatattttcacgaatggacgtatccagcagcagcccttcatctttgcggttctccgtaatcaggccgagtcccttgcggatggcatcgtacggaccccgaatgcgggtttttcggccggaaatccagatctctccggaatcgagccggtcaattccgaacagcgccctcatgatttctgtccgtccggcacccattaagccggaaacgccgaggatttctccggcgctcacatggaaactgacctgtgaaaagcttcctttttttgaggcgtttttcacttcgagcaccttatcgccgagtgacggcgtgcgagtcggataccgatcggtcagctcccgcccgaccatttgtttgaccacttcatcaaaattagtatctttaatatgcgtcgtatcgacagtgaggccgtcccgcataatggtgatccggtcgcaaatcgaaaatatctcttccattcggtgtgaaatatagacgatggatacgccgtcccgctttaacgccgtcatcacgtcaaacagtttgctgatttcccgttcggtcagcgccgcggtcggttcgtccataataatgacttcggcgtttgtcatcagcgctttggcaatctcaatcatctgctgctgtccgacggaacattgtccggcttcccggtcaagaggaagagagactcccagtttttcaagctgtgattttgctagcgctttcattttctttgtttctaaaacgccgaacgccgtcgtcagctctttgccgataaaaaggttttcaagcaccgtcatgtccggccatatattcagctcttgatggataaaggcgattccgtgcttttcagcttcctttggattggagaagctcatatttgttccgtttatcgtaatgtttcccttgtcgagccggtggagcccggtgagcagattcattaacgtcgatttgcccgctccgttttctcccattaaagcgtggatttctcccggcagaagctcaaatgagacgccggagagtacttggtttttgccgaatgctttatgaatgtctgtcatgccgatgtgcatgctggatcccttctttctagaaaatcacacccgcctgcaggatgcagttggcgtatggtgtcatttcacccgttcggatgacggcttttgctttctgtgtgagccgtttgaattcctcgtgggacatgtactcgatcgtctgcgctgagaaatggctttctatgaaacttgcattctcagggtttgcgtctttgatttcagaggcggccatcaccttttcgactgccatctccccggctaccaggctggttacgtcccgaaaggcgggaacgcccgccgttaaagacaaatcaattttagggacaccgtcagggacggggagacccgcatcgccgattgcgatgaggtctgtatgcccgagatcggccaatactttggcaatgtggctgtttaacattccgtgttttttcatgacagcagctcctcaacttcttttctggccggcatcccgccttgggcgccgaagtgctgcacggacagggaggcggcgcggttggcaaacaggagcgcttgttcaatgtcccgtccttccgcgagtgcgacggcaagtgccgcattaaaggtatcgccggctcccgtcgtgtcgaccgcttctgcagggaaggcgggaacaagccgttccgcggtgccgtctgagtagcgtacgccttgttttccttcggtaatgaacagtttgccgggatagccggcgagcgcttcttctttcgtccggtcaggaaataaaatggatgcttcatgttcgttcggcgtaagatatgcggcatcctcaatcgtcgattgtttcagcggccgggccggcgcgggattcaggataaccggaatttgctgcgcgcggcagtagctgcacacttcttcaacggtttcttcaggaatctcctgctggatcagcacgatatcaatgccgggaagttttgccagcgcacttttggcataatcgggggagatgtcatcgtttgcgccttttacgacgacgatgctgttgtctccttctgcgagcacaatatgagccgttccgctttttttatgtgtaaccgtttccatatagtccgtattgacaccgtttgccttcaggttttcaataatcgcttttccgtagctgtcattgcctgcttttcctaccatatatacgtttgcgcccaggcgggaagcggctacggcctgatttgcgccttttcctccgggcacagtttgaaagtctgtacccagtacggtttctccggctttcggacgccgttcagatgtgacgaccagatccatagaacagcttccgataacacaaatttcactcatggtgatcatcctttctcgtcgtttgtcttcttatgtaagtcacgggcatttgaatggccgtctctttcggcggctctttctttatcaattgcagcagcaggtttgccgctttttttcccatctcatatgcaggctggcggatggttgaaagcggcgggaacaaaagcctgctctgcggaatatcgtcgtatccgatgatctgaatctcctccggaacttttttgccgagccgcagcgcctcatggaggacggcagccgccgcaatgtcgttgctggcaatgactccgtcggtttcagggtatgctgcaaacaattcttctgctaaaatggcggcatccttgatggaaaatgaagcggcggagatgacattgaacggcgcgcccgctttttgcagcacgttaagtgcgccgctaaaacgttcctgagcggtcggaaggtggactgggcctttgacaagcgtgatgcttttgcttttgccgcgaagtatttcctcagccgcccgttttccgcctgcccgtccgtcactgaatacggatggggcgccttcttttgtccggtccagaaatacgaccgggtaaaggctgccgctgtattcgggaagatcggggtaatgggtggccgccaaaataccggcaacttgattttgtttaaatgtttgcagatagtcgagttctttttccaattcttcatcgctgttgccaatgatcagccggtatccttcccgctgcaactcgtcttcagcgccgcgggcaagctgagggaaaaagggattcgtaatatccggaagcaaaagcccgaccagtctggattctcttttataaagagagcgggcaacttcattaggataataattcagcttctccatggcaagcatgaccttcgttcgtgtatcttcatgcacgtagccgttgtcattgaggacacgcgaaaccgtggcaacagagacgccggcagcgcctgcgacatctttaatcgttgccaacaaacactcctcctccatttatgtaaccgtttacacaaaaagagtaccacgaatcatttcggttggcaacaaaaaaagagaccggggtctcttttagttcacgatgccgatttgtgagatattcactttgatatcagggattatctcgatggaaggatagacctcacgccaattgagccgcttgccccgctcataataatgggtttgatatttacggccgatgccgaggatatccgaattgtgctcctgaatatggctgatcaccgatctggcctggctgttcaaatttgctgatgcttgtttgttcatttggtcgattgccgtataagaattcagcttgtcctttggatattccaagacgcgtgcattcagttttaaacggattttcacttttatatgctgcggatctgtatctataaatacaatctttcgcgtggcatccgtgatgccgagagaaagataattttcaatatccattttgtatttgtcccacagcttcagattaatattagccgatttattaaattgcccgcttaaaagggtcaggagggtcgaatcctgaccgagcacctcagtcactttccgctggccgctgaacagggcagaaccctctatctttatcgtctgtccgttaatcgataaataaggaagggcgaaatccttatcagccgtcagcatgcttgaacggatggattgcaaattttccatgctgatatttgattccgcattagcgcttgttaataaattcgttaaatacttgctgacgatcaatttctgccggacgatcagcttcagcacttcaatcgcctcaccgtctttgacaaccgccggatgagcgagaagcgggcttttcggatctctgtaaaagacatcgagataaggaaaaagcggtttttccgccattttctcaccgattaataagactctttgcttggacgtgtcaatgcgctgatcgacaagcttatccaattgaaaccgcgcttcacggatggtgtgcccggaagcgctgagcaccgtcgtaatgaatgagccgcccgtttcctgttccgcctgggaggactgaaccttccgataggtgatgccgattttatttttaccgtcatgatcaacatcaaggcttgcggtcagcacgagagaaatatctttcagcaaattttgatcccagcagcccgcaagtgtcaggcttgcgcacatgagactgataagaaccgcttttttaatgcgcatggcggacaccctttttgcgtacaaggacaatcaataccataaacaacggaaacaaatacacaaacacaatatcggaaatgcggaaaaactgatccagctgctgtatcgttttatccgtgcttgtggcccaaatagacagaaggaagacgagcagggccagcggataaacaaaccggctgtggtctttttgattgaacagcttggcgatgccggtgcttgccaagtaaaacacgttggccagcgttgaaaagacggtcacgaaccaaaacgtcaaaaagagcagatccgtccgttcgataattctgaatgaaacggtttttaacaggtacagcacaggctccgggatcatttttatttcttcggggctgattgtgacaaagcaagcaagggtgatatacaggtaataaaggataatcaagatgtttgaaatcgtcagtattttgtagcgctggctgacggtgcagttgataaggggcccgatcacgagcgccgcctgaaagccggtaatgctgacaagtgtttgctgcaccccggtaagcatgtcttttgcggttccgtgaaaaatcggcataatgtatgtgatatcggcttttcccagcgtgtataaaatcggcagagagatcagcagcaaaaacggcgttaagataaagctgaacctggcgatcgcattcagcggggcttgggcgatatagacagaaccgaggatcagcattaagctgaccacccaattcggagtctgcgggagcacccagatatccaatatccgtgtaaatacagaaagaatgagcgtgcagagaaacgcgaaatataaaatatacagcacctgcacccctttgccggcaagtgttccgaacacctcctccagcatttcgtacaagttcagcttcggaaaccggtgaaatattatcatatacaggctgaatgtaagctggacgagcaatccggtaagcagaatggaaatccatccgctgcttcccgatttcatcatcagtaaatggggcagcgccaaaatgccgatgctgatctgcgtctgattaatgaaaaacacgccttgaagccggcttatttttttaggcttcatcttttctccacccccgaacatgtttcatctgctttgagtcttgcggtctcaaataaaaaggccttcttttaataaaccaagccggcagccggataaatgcatccttcaaatcgctgaaatgaaacggcgtcagagatgataaataaggaacgccgagtgattcaagcttgcacaggttcatcagaataagcccgaagccgagtgcgatgccgataaaaccgaacgaggatgccagaaacataagcggaaatctgagcgttcggatggacgtgctcatttcatatgaaggaagcacaaaagaagaaacggccgtaacggctacgacgataatcatcatattagaaatgagtcccgcctgaacgactgcgtcaccgatcacgagaccgccgacaatgccgatcgtctgactgatcggtttcggcagcctgataccggcttcgcggatcagttcaattgtaatctccataatcatggcttctatcagcggagggaagggaatatcaacaatcgaatttttcatggtgataatcagatcgttgggaatgacttcgaaatgaaacgcaatcagcgcgatataaaaagcgggcagcgtaatcgcgatcataaaggcgaaaaatctcagcactcttaaaaaactggcggaaatccatctcgtgctgtagtcatccggagattgaaaaaaagaaaagaatgtgatcggcgcaatcaaagccgacgggctcccgtccatcatgatcagcacacagccttccatcacgcatgcttttgctttatccggccgttccgtatgaatgatctgcggaaaaatggaaaacgaattatcttctattgattcctcgataatcccgggcgcaagcacgctgtctatacgcaggtatgacaggcgccgcttcacttcctccacaatctccggattggcgatattctcaacaaagataaccgcaacctttgatttggctctttccccgatatccatataatgaacggagagatggcggtcctgtatgtgaaaccgcagctgatgaatgttcgtttccaaactttccacaaacccgtcatgggcgccgcggacgatactttcagattcgggttccataatggaacgcagcggattctgcccgacagaaaacagcttcgctttcctcgatgcatcgctgagaaaaacaacctgcccggccaaaatcccgtcaatgagttttctggtttcatccgtttccgcactgctgacggcattcatcgtttcctcgagcgggccgttctgcagggtgtcgcttaacagaaactcattcagcttctgttcttctatcatttgttcaatataaaagaaagcggtatgacggtcctgcagtttgatccttcgtattttaaaatcaccgcaaacacacatcagctcctgcatttcccgtacagccgattcaaaatcgccgggaatccgtttgttttgtttatccgcagacatcagaccgcctcctttcccggttatctgtagttttcagcgggtattccttttttatgcattttataaaatagaggagctcctcgatgttttaccaagaacttcacatttatggatgaatatttcttgaacgaatataaagatttattaaaattatttcaaaagagggataaatgtcctgtaaatggtttaaaaggagaaaggctttccgcatataaaatgtgtatttcttgtaaacactccggacccgtcttattctgtcatgtaccagtcattccgctagttattttggaatgggactgaaagcaggatacgggggaaaaatgaatgactttaagaccttatccttaacaaaacaggcagtctgcacacagcggacagagagtcccgaaacgtatgcgcagtgcgataaacgctgatacaaacgggctggaaaagatggattatcattacatctttttcttccggaacgcgaatagttccattggtccaaatgaatttctgtgcgtaaatgtaaacgcattcatttttcttttgaaaaattgaagtaaggttgaagtcctgcctattcccaaaaaaagcaattcgataataggaagaatagcgtcactaatagagaagtttggctcagtgaaagcgggaagattatgttacataatgccgattgagaattcatagtgaagctatatactgatgaatgaatttatcaatacagaaggagatgtcaaaaatcaatgtggttactcattatagcctgtgctgccgtactaatcatcggaatcattgaaaaaaggcggcatcagaagaatatcgatgctctgccagtacgcgtcaatattaatggtatccgcggaaagtcaaccgtaacgaggctgacgaccggaatactgatggaggcgggctacaaaacagtcggaaaaacgacgggaacagatgcaaggatgatttattgggatacacctgaggagaaaccgatcaaacggaaaccgcagggcccgaatatcggcgagcaaaaagaagtaatgaaggaaaccgtagaacggggcgccaatgccattgtcagtgaatgtatggcggtaaacccggattatcagattatctttcaggaagaactccttcaagccaacatcggcgtcatcgtgaatgtgcttgaagaccatatggacgtcatggggccgacgcttgatgaaatcgctgaagcatttaccgcgacgataccgtataacggtcaccttgtcattacagacagtgaatacacagacttctttaaagaaaaagccgcagagcgaaataccgaggtcattattgcggataactctaaaattacagatgaataccttcgtaaatttgaatatatggtctttcctgataacgcttcccttgcgctcggcgttgctcaggctcttgggatagatgaagaaacggcgtttaaaggaatgctgaatgcgccgcctgatcctggcgctatgagaatcctgccgctgctcagcacgaaggagcccggtcatttcgtaaacggctttgccgcaaatgatgcatcttctactttaaatatatggaaacgtgtaaaggaaatcggctacccgacagatgaaccgatcgttatcatgaactgccgcgccgaccgtgtggacagaacgattcagttcgcaaacgacgtgcttccgtacattaaaacgaaggaactcatactcatcggcgagacgacagaaccgatcgtcagagcttatgaagaaggcaagattcctgccgatacactgcacgatctggaatataaatcaacagacgaaatcatggacgtgctgaaaacaagaatgcaaaaccgtgtcatatatggcgtcggcaatatccacggttcagcggaaccattaattgaaaaaattcaagagtataaggtgaaacagctcgttagctaggaggaaaaggataaatgttcggatcagatttatacatctcacttattttaggcgtgttaatcagtttaattttcgcggaaaaaacaggtatcgtacctgccggtttagtcgtgccgggttatttagggctcgtttttaaccagccggtctttattttactcgtattgttagtaagtcttcttacatacgtgatcgtcaaatacggtttatccagatttatgattttgtacggacgcagaaaattcgcagctatgctgataacgggaatctgcttaaaaatcgcccttgatttcctttacccgatcgtaccgtttgagatatcagaattccgcggaatcggtatcatcgtaccgggtctgatcgccaataccattcagaaacagggattaacgattacatttgccagcacgctgttcttaagcggcgcaacttttgccattatgtttgcttactacttaatctaatgtaaggtgtgtcaaacgatgaaaaaacaattaagctttcaagaaaaactgctgaagctgaccaaacagcagaaaaagaagaccaatcttcacgtttttatcgcgctgccgatcgtcttttgcctgatgttcgtctgcattctgacagggaaggcggaaacgccgagtgtgaaaagaaatgccgatgaccttgtgtcagcctcattcgtcggagatattatgatgggccggaatgtcgagaaagtgacaaagcataaaggcacggagagtgtcttccgttacgcaaagccattcttcgaagcatccgactatgtgtcggggaactttgaaaacccggttacatataaaaagaactacaaagaagcagaaaaaaatatccaccttcagtcaaacaaagatgccgtaaaagtattgaaggacatgaatttcaccgttctcacggcagccaacaaccatgcgatggattacggccctcaaggaatgcgggatacggttgaagagttttcaaagcaaaatcttgaacttgtcggcgcgggcctcacgctgaaggaagccgagcagaacatttcttatcaagatgtaaacggaatcaaaatcgcaacactgggtttcactgatgtttcaggaaaaggctttgcagctaaacgaaatgcgccgggtgtgcttccggccgatccagagctgtttattccgatgatttctaaagccaaaaagaaagccgatcttgtcattgttcaaacacactggggacaggaatacgataatgatccgaatgacagacagcgccaattggcaagagcaatgtcagatgccggagcggatattatcgtcggacaccatccgcacgtgctggaaccgatcgaaatgtaccacggcactgttattttctacagcctgggcaacttcgtattcgaccaggggtggacaagaacgagagacacggcgcttgttcaatatcatctgcagaaaaacggcacgggacgctttgaagtcacgccgatgaatattcatgaagcaacgcctgcaccggttaaaaaaggcagcatcaatcataaaacgatcgtacgtgaactgacgaaagaatcgaatttcgattggagcgtcaaggatggaaaattaacgtttgatgtggatcacagcgatatcttaaaaaagaaagcggagtgaaaaacaaatgaaaatcattaaagcgggatggccgtttgccgcgatcattatggtatttatgtttatgtcagcgtttaaatacaatgatcagctcacagatcaggaaaaacaaaaaattgatacggaaatgcaaaagattcagcaagaggacacagcgagcgcaaaataagcgcatgattccgcttgccggcatattgtttgttccgaatccagtaaagaatgcccgtaacgggcattctttttttgtgtgctctcctaaacatttgttaaaagttaccgatgtaaaaactactaaaaatgaggagagtgaatagaaaacatgctcacaagctggaggaagtacatccttgccggccttatgatttgtcttgtggcacccgcagtaacgagaacggaaattgctgaagcggattctcaagtttctgtcctgatggtttcagacgcgcaaaaacttgtcggaaataaatatgtttacggaggcgaagagcctgaggacggttttgatccgtccggattgatgcattatcttttcagcagacagaacatccatctgccgagaacggtcagtgatcaatggaaagtcggagctgctgtcaaagaaaatgaccttttaccgggagatcttgtgtttttcaaaaagtcggattccgcacaaaacgcgcccgtccatgacggtctttatatcggaaacggagagatgatacacagttctccgtcagaaggcgtaaccgtcacacgctttcaaaaaagcagttattggatgaatttatatcttggcgcaaagcggattacaaaagatccggaactggctgatgatccgatcgttcaggaggcagcccgttatctcgacattccgtatgtattcggcggaagcacgcccgaggagggattcgactgttcggggctggtccaatatgtttttgagaacaagcttcacatttacctgccgagatctgcggaacagcagtggctggtcggtgagaaaatcaaactgagcgacataaagcccggggacgtgatttatttcagcgacacgtataaaaaaggaatttcccatgcgggcatttatgcgggagagggaaggttcatccaagcaagccgctccgcaaaagtcaccatttcttacttgtcggaagattactggaaaaaacattttacgggggtgcgccgattcagcaatttagccatttctaaagaaaatcccgttgtgtccacagcggccgatcatatcggaatttcttatctgaaaggcggcgtttcaccggaaaccggctttgatacggcgggatttgttcaatacatctatcaaaaagcgaaaggaatcagcctgccgcgttatgcggacaagcagatgcaggcgggcgttccggtcgataaacaagatctgaagcccggcgatctggtcttctttaaagcggaaagcctgaatccggccatttatatcgggaacggacaagtgattcatgtcaccgtgtccgcaggcgttaccataacaaatatgaacacaagcgcttattggaaggacaaatatgcgggcagcatccggcttccgtaaaaaaaagacgtcagagagtgtctctgacgtctttttcttttaccgtttcggcgctctgtatccggccgctaccgcatcctctacggaacagaacatttccgcgggatctgtcgtccggtcgtagtatgtacttcccggcgtgtgataaatgccgttccggctgcctttaatgtcgcatccctgtgaggtgccggctgctttcgtttcggcatgtcctccggaggaaggggcgttgttttgcgccgtttccgcgttttcggatgtttttgtttctgctttctgccgctttaaagttttattttctgactgaagcgtttcagcggtcttttcgagcttcttttgtgaattttttaatttctcattgtcttgtttgagtgatttgtttgtttttttcagctcacttatctcttggctgagtttgctgagtttttcttcattgccggcttcggcttcggttttctccttttcggccgcggcactgatgctttcatattttttctcaagcgcctggtgttccttcgtcaatttttgataagcggtatcaagggtgctgtatttctcctctgccttctcggccgaggcgtccggctctgcgagggaagcgccggtcagaagcaggataaatccgccgatgagaaggggccaaaacagcttttttgaaaaatgtttttctttttttgccgctttgcatatgagatggaatattccgtatccgactgcgcagagaaaagctaaacatcctataatagcgattgcattcgacatcatgaaactccttttttctctatcttacaatttattttcatttttgggaatttcttttttggaaacatgaaaaaccaggccgtgaaagacctggcttttgccttttattgatcgttgtcgagaagccggttgatgaaatatgcgacgccgttttcatcgttgctttttgtaatatacgtgcttttttccttcagttcatcaatcgcattgcccatggcgatgcggtttcccgccgcttcaaacatggagaaatcattcgggctgtcgccgatggcgtaaatatcctgtttttcaattccgtacagtgaggcaagctccgtcagagcacgtccctttccggaaccggcagggaggatttcgataatgtgtttcccggaagatgtctgggataatttcggatgatgtgtaatttcttctttggcgtttctcagtttttccatatcaaaagagaaacaaagaagcttgtaaacatgttcgtctccgttaaaaatcgcctgtatatcctgcacgggtttaatgccgaattgtttgaactgcgtctttgcgccctcccataatgtccgaatatcttccttgggattggcgcttttcagaatgtccagttctgcctgcagtttggactcgccgtcaaatggggacagcagatgatcatctgtatagacctcaaaataaatgtctttgtccgttaaataagcggcgatatccttcccggcctgctgatccattaagagccggctgacgaggcggtatcctttgtcatggactgtcccgccgtttgccgcaatgatcggaatatccaaatccttcaagagcgcttttacatcaaacgtggctctgcccgtgcagatggccacgagaatgcccgcttcatccgctctttgtaaagccgctctgttttccggagaaatcacactgtccgagttcagtaatgtgccgtctaagtcaatggctatcaatttcatatgtatggatgccctccttaaaaataaagctgcttcatgtagtatgttcagctttgtgcgaaatcagcagaaagccgtcagttaaaaggctataccttcatgtcctttttttcaacagaaaaacggcgggatttgctaatcccgccgtgacatcttacgcgtttaaatcattttttaattttgtttttacttcttgaaggttttcctcattcagcttgaagtaataaatatttttgccgtactgaggagtgtaaatatagctgtctgaacctgtcagctgcaaagaatccaccgatttcagcgatgtgataaacgggaacagaccgatggcgtcattaagagataagttcatttttaagtttttccctaagctgtcgacgatatcgtcataagatgggatcgagcttaacgatttagattttttaataatggcgctcagcacttccatctgtctttgtccgcgcatcagatcggtgtccgcttttcgtgttcttacataagccagcgcctgctcaccgtcaagcgtctggacgcccggcttcagcacgacttttccttttgtatcgactttaatacgatcggcaattttctggcttttcacatttaccgtaacgccgttcaattcattgacgacatcgcggaacgcgtcgaagttgctctcaaccacataatctaccggaatatcaagcatgttttctactgttttataagttaaattataaccgccgtaagcatgtgcgtgcgcgaatttgtcatagccgtgtcccgggatgttgacataggaatcccgcggaatgctgagcattgtcgctgttttctttttccggttgaaggtgacgagcacgttggcgtcacttcttgcgtcatctactgattcgcccttattgtcacgggcgtctattcctaaaagcaatacggtgaaagaatccttcttcgggtcaaattctttgatccgttttacggactggtcgccgcggtcaaggctgacgtgcgcttctttggtcgcattattcaatttcacaaatgcgtaggtgccgacggaaccggcgatcaccaataagaaagcggcgaataccagtacaaatttcacccattttctgaggcgtcttttcttttttctgcgttgagatcgttcttccatatcattacctctcgtttctattctttgtgaagcgtaccataattgttgacttggagcaactctgcaaatgagaaaattccaaatctttctctctatttcgacaacatctactgttatttttgcatcaggttcacattatattggacggcaggaagcgggaaatgtttcgtcgctttgtaaaaaataattagtaaaataatggatattaacggtgcggaaggtttgaaacggacggaaacaggtaaaagaagcagtagaacaattccgcgcggatacagcgttggatgaagggagtctacataacatgaaaagcatacactcgaataaatggctctattttttcggcgcactcggcggcgcgttatacggatatgataccggagtcatttccggagctattttatttatgaaaaaagaactgggactgaacgcctttacagaaggcctcgtcgtcagttcgttattggcgggggcgattctcggatcgggattcgccggcaaactgaccgaccggttcggcaggcggaaggccatcatgggagcggcgctgctgttttgtataggcggtttaggagtcgcttttgccccgaatacagaggtgatggttcttttccggatcattctcggactggctgtcggaacatctacaacgatcgttccgctctatttatcggagctggctccgaaacataaacggggggcgctttcttcgctgaatcagctgatgattacggtcggaatcctcgtttcttatatcgtgaactatatatttgccgatgcaggcgcttggcgctggatgcttggacttgcggttgtgccgtcagtcattctgctgatcggaatcttatttatgccggaaagcccgcgctggctgtttacgatcggcaaagaagagaaagcaagagaaatcctttcatcattgcggggaacgaagaatattgatgatgagattgatcagatgaaagaagcggaaaaggaaaacgaaggcggcttgaaagaattgtttgagccgtgggtgagacccgcgctgattgccggccttggacttgcctttttgcagcaattcatcgggacaaatacaattatttattacgccccgaaaacatttaccagtgtcgggttcggcaattccgcgtctatattgggaacggtcggaatcggcgccgtcaatgtcatcatgacgcttgcggctattaaagtcattgataaaatcggccggaagccgttgctgctggccggtaatgcgggcatggtcatcagtctgctcgtattggccgcggtcaatcttttctttgaacattcagcagccgcatcatggacaacggtgatttgtttaggcctgtttatcattgtgtttgcggtcagctgggggcctgccgtgtgggtcatgcttcctgaattgttcccgctgcatgtccggggtatcgggacgggtgtctccactttgatgctgcatgccggaacattgattgtctcattaacctatccgatgttaatggaagcagtcggcatcagctatttatttctcatttatgccgcgatcgggatactggcattcctgttcgtccggtttaaagtgaccgagacgaaggggaaaagccttgaagaaattgagcaggatctgaaaagccgtaacggaggctcgggatcagaatcaaatcggcggacagttcatccgtaatattcagttttaggggggcggttattcaccggcccctcaaaacggatgccgagcgggcgcccggtcacataaatgacggggatatgtcatacgttgtataaagtcacgataaaggcggggatgccggtgaaaacgagtattattatccttacatataatgaacttgagctgacgaaaaaatgtctggccagcattgaacgatacaccgacaaagataagattgaactgattatagttgacaacggttcctcagacggaacgagagaatacatatcaaatctgcctgacgtcaaagtcatcctaaatgaaaaaaacctcgggttcgccaaagggtgcaaccagggtatcgaagcggcagggggagaaaatctgctgtttctgaacaacgatacgatggtcacgaaaaattggctcacctccatgctgagggtgctgtatcattctgaaaaagccggtatggtcgggcccgtcagcaactatgtcagcggcgcgcaaatgatccatgacgcgtatcaatcgcttgatgagctggagtcattcgcggaggcgtattgcgcacgggaaaaacatcatacaaagcgggtgctgcgccttgtcggtttctgtcttctggtgaaaagaagcgtcattgaagacatcggcccgttcgatgaacaattcggatacggttcttttgaagatgatgacctatgtctgcgcgccctgcaaaaaggctacagcctgcacatcgccctcgatgcttttgtgcatcaccacgggcacgcgacgtttacggctaatcaggatatcaatatcaatcagttatattcggagaaccgccagcggtttacggaaaaatggggcactgattttacgtactttactcatccgagaccggaaattgcggagctcgttccccgggaggcgaaacggatacttgatgtcggctgcggcgcgggggctacggggctggaacttcaaaacagacagccttgcgaactgtacggaatagaactgcacccgctggcggcgcaagcggcaaaaggacactatgaagcggtgctgcaggaagatgtcgaagaagtgaagctgccttatccggaaggcttttttgattgcatcattttcgcggacatccttgagcacttaaaagacccgtggcgcgtcattgaaacgtattcatcctatttgtcgcctgccggatcaatcgtttgcagcattccgaatatttcccacgccgaagcgctgttcccgcttctgctcggtgactggacatacagagacgccggcattctcgaccgcacccacttgcggttttttacgccgcagacggtgcgcacgctctttccggaagagacatttgctgtgaaaaagcagtcctatacgtatgttcacgtggatgagcgggtgcagctgtttttacaggaaatcacacgaatggcgcaatcgatgcaatttccggtgacacaactgcccgaacaaagccggatttatcaaattctcctccgtgtcgaaaaaacaggctaaaggctaccgtcccatcgttccgaagttggtaatctgaatggaaacatcatagtcaaaagccgcttcggagaaggtctcatcccaatgatgctttactttcttccaatagtcgggatattgaatgcggactctgtcagaaaagaatacagggtccgtttcatattgattctgcagcttttcgatgacttctttcacatcgcttttcagttttttttcgaaaatcttttccagcccgtttaaatagtgctgatcgaatgaatcttctccggcatattgatcctctgacaaaagtccttttgtttttaccgatacatgaaatgacagcttcccatttttcagcctgggagtgatggtagatgttgattttttgatctcgaaggtaatcgggtgcccccctttatccaaagcgggcagcacgccgccccgtatcgtccccatcagccaattcaggctctgtatttcgtatgatgacagaaagcccgccaatctgttttgttttgcgtttttgataatggccgctccgtcatacaccgtttttcctttttgattgctgacggcctgaatgagaaaactgagtttattatggcagtaaatcgaagctctcccgattcggagcggttttaaaatcttcccgttgtagccgccgttgttcgtaaggtcgatcagcttttccgcggccataggctgctgctgattcggcgtcggctccgtcagaatatcggacgcttttcctcttaccgcgaagagatagctgctccgccttaattcatcatcgcggataaaatgattcatcatctgcagtatattttggtcggccagcaatttgtcgctgaatatcagaacttttaagtgatcgctgtaaacaggcggatcttttaaagcgacttcactgacggcttcaagtatggtatccccccgcgtcgtcacattgacaaacacgggccggccggaagcctggctgttttcgctttggggcagcaggttttgataggttaatttatatcggcggtcactcgtctcgtctatcgccagtccccgggcgaaagacagcttttcgacttccttcgcgtcccagcatcctgaaagcgtcatcaatatgaaaagcgccgccgcccattttatgaaaagtgtcatgacgtctgtttcctcccggctatttttttcatccagctgacaaaccaaatgagaaaaggaatcataatgacggcaaaaaacgtatacccgagaatattcgcgaatgcaaacacgctgttgatatcatcggggtacatcgaaaggccgaatgtcactgtcaataagctccccatcagccaggcattgtttttattttttagtctgaaaatggtgtttaatccgatatgcgcccctttaaaagagccgagcatacaggtaaactgctggcatgtccacgtgattaaaagaaagatatcaaaccgctcaatgaaaatgccccggatttctaaggcgtgaatcagggaaatggtcggatacgtcaccgttttggcttcagcgaccgacatacagccgatgacgacaagcagcgtaacgctgtaaaataaccctgcgcctgcgatgccgaagacagccgcctttttcgcctgcttcgggtttttcataaacggcaccagatacagaatcacctcaagtcctgaaaaatacaaaagggtccgcggaaacatctcaaaaaagcttttgtagcctccttccatgaccgggcggacgaaatccagattaaacagtctcaggctgaatatgagcagcgtaatcagaatgacgatcgtaaccgggaacagataggcataaagctttgaaatgggatagaccccgccggtcacatggtagatgccgaccgccaaaaagatgaatatgacgacacccatcggcgtatttttcagtaaaaagtaattgatgacttcaccgagaaaacgggcttgaaaacagacggtgacgacaaaataacagctgatgaataaattcagaagagaaccgatggcgcgtcccatgatgctttgattcagctcatatatggtttccccgctgtttttctgcaaaaacggcataaagagcaggacgatgccgataaacacgacactctgcacaagaataatgatccatccgctcggactgtccgctgttgcggcggagcgcggcagtgttaacacgcccgctccgatcattgttccgcttaccatgagaagtgtctgcataaacgacagcttgtcttccggttttttcatggggatcacctttgcttgattttatctttcgtctcttttctggtcggccgttttttcaaaagaggtgtcggcagtctgacgatcgtatcttttaagtcttggccaggctgcgccatgatcggaataagatagtcctgaccgaagcttttcagacgcatcagatggccgatgacaagcagatagcacatgatcagtccgtataaacctaatatcgccgacaaaatcattgaaaaaatacggatgagcctcagcggaaaattgaacgcataggagggcgccgtaaaagaagccaacgccgtaacggatacgacaatgaccatcatcgcgctgacaatattcgcctgaacggcggcctgtccgatcaccacgcccccgatcaggccgatcgtctgtccgatcggcttcggcagcctgagtccggcttctctgatcatctcaatcgtaaaaatcatgatgaacgcttcaacaaaaggagggaacgggacattcaatctgcttccggcaatcgtaaccgccattctcgtcggcaaaagccctgtgtgaaacgtaacgagcgatatgtaaaggccgggtaaataaatcgtgattaaaatacatgtataccgaagcagcctgagaaaggtaaccggaacccaccgctgattataatcgtcaggtgagtggataaattcatcaatggtagccggcaccaaaagggtaaaaggcgttccgtctacaagaatggaaacccttccttccaaaagagcgcccataacccggtcgggccgttcggtcgtcaagacggtcgggaaaatggaatacgtgttatcttcaataagctgctcgatcgctcctgattccggaatgtcatcaatggtgatggaatccagtcttttcatcacttcttttacgacatcatcaggcgcgatatcccgaatgtaagcaacggcgatccgcttttttgtccgttcgccgagtgtgatctctttgatctgaaggttgggatcaccggactgctcgcgcaacagcgccgtgtttgttcggagcttttcgacaaaacctattctaggcccccgttcaagcacttctgaagccggttcttcaatatcacgcattttaaatgtttccgtctcaaatgaaagggcttcctcccatccatccgccagcaaaaccgatttgccggagaaaatgtctgcctccgcgtccttaagtgaagaaagccgggtgtgacgatagccgaaagagatggatgacggcggtatttcagccggttcctcttggtgccgggcggccgcctgtacgggcgaaataatatattccgcaagcaattgattgtcggtcagtccgtctatatatataagacaggcgtcacatttgccgtttccgtacgtaaacgaataaaacatcatgtcatcgctttggccgaatcgttttttcagcgcttcaaggtttttgctgagctccgcatgtatcgtcacaatgttccccccctttttccatcagttattttaatttgcgacaaacaaggcattttattctggaataggaaatgactgagcattccgccccatccgaatggtataatgagcaggtcagccattttatacatattgtttttaaccgcggctccctccgtgttttaaaaaagacacagggggaatgggatatgagccgctttttaaggggaggggaacgaacatgacgcaagagccgatttttttacagcctgtatgtaaagaaaaactatggggcggcacgttattacgcgaacgattcggatacgacataccttcagaaacaaccggcgaatgctgggcgatttcagcccatccgcacggaatgagcacggtcaaaagcggtccgtatcaagggaaaaccttgatggaactgtgggatcagcatagagaattattcggcggaacggaaggggaccggtttccgctgctgacgaaaatactggacgtcaaacatcatctgtctgttaaagtccatcctgacgattatgatgccgaggagcatggactgggcgaaacggggaaatctgagtgctggtacattattgactgtaaagaaaatgcggaaatcatatacggtcacacggcccgttcgaaagcggaacttgtcaccatgattaacagcggtgactgggaaggcctgctgcgccgtgtgaagatcaaacccggtgatttttattatgtgccgagcggaaccatccatgccatttgcgcgggggcgctcgtgcttgaaacacagcagaattcagaggccgcctaccggatatatgattacgggcgtacagatcaaaacggccagccgcgtgagctgcatatccgcgatgccgtcaacgccgccaccgttcctcatgtggacggatttttagatgaatcaactgaaacgagaaaaggcgtcaccatcaaaacctttgtgcagggagaatatttttctgtatacaaatgggatatcagcgggacggcggaaatgacccaggacgctccgtttatgctgtgcagcgtcacagaaggaagcggctccatcatctgtgaaggcaagtccgccaagcttgaaaaaggcgcgcatttcatactgccggatcagatgcctgactttacgataaacggagattgcacgctcatcgtttctcatatataaaaccaaacttaatcccagctctgggattaagtttttttatatatatatttcactttaaaaattgaagcactttccgataaaaatagtagtgtgatagataaatatagagaaggaggagaggtaatgaaaaaaagtttggctgctgcaatgttattgtccgcggttactcttgaatttttcacgataacagactcagtaaaggcagcttatattgacaattccatttatcagttagaaacaacacaaaagtttgcttctgaaagtgaggcttctcaggcagttgcaaaattgaaaaaagataccggatggaaagcagactatcaaaagagcggaacgtctaagaactatcaaatatctgcttcaggtctgacaagcgaaacgaatgctaaaagcgtactaagcgattttacgaagcagacaggcattaaaggaacatcaagtccgacgggcagtaagcagccctattatactgcagtttccggaactatttcaggtgaacagcaggctaataacttgcttaataaaatgaaaaaggaaacaggattaaccggtactgttaaaccgaatggtgtgaggcagccttatataagtattgttacatctgaactgacaagtgaggccggtgcaaagtctgctattcaagagttaaagaagcagactggagtcaatgctaattatcaaaaacttgaacaggaaccggagatcattcaaattcaatccggaaaaattcaaggagagaaaacagcatctcaagtgaaaagcagttttcaaaaagattctgggctgaatgccacgttaaacatgattgataaaggccagtcttactacattgttacaacgacttctttgattaataaagcagatgaggcgaaaagtcttatcaaacagcttgaacaaagcacaggcgtcaaaagcagttacaaaaccatcaataataaaaaaactatcacatcgtatgatatagaaacgggttattttaacgggttgggtatggttaaaaattccatcagtcaaataaaaaataacacaggagttaaagggtcctaccaaaaagttggtgcaactagtaattattttgtgaaaatgaaggatgtcagcccggaaaaactaaaaagtcttcaagctttttttaagaagaaaagatggcatatgacttataaagctgtaaagaaaacttcaacccaaacaacttatcaagtgataacaaatgctgtgacaaacgcacaggcagataaagcagtaaattttcttagcagaaaaaaattaaaatcatcaaaatcaaattcaggaaaaccagctgctaatcaatatcaactgttatcacaacagactgctgacaaaacaaaagtaacaaaaggtttaaactctttaaagaaaatcggtattaatgcagctgccaaatctataaaacaaccaaaaggaataacttataaaattaagacagaagccttgctggacacagctaagattaatcaagtcaaatctttcttcaagacaaaaaaattaacggcagtaagtgaaaaaaccggtaaatccgcttatacgcaatatcaagtcactgttagtgacttattaaatcaaaaagatatagatcgtgtgttaactttttttaaaacaaataatgcgaaaggcaacgccaaacaaaatggcaaaagcacatacacgcaatataaattagttacagatcaaatcagcacatcgtcggctttaaacaaaggactgagtttctttaaggcaaagaacttatcagcaagctacactactaaaaacaatccaatatacagtatagtgattactgaacaatttacaggaaaaagcaatgctgataaggctgcaagcaaagtgaagcagctttatgggtgggcagtttcaagtgttgaggtgaaaagcggtcctcaaataatggaaacaaattataatattacgatgagtgaaatggtcgcgaaacagttaaaagcgaacccgcagacggattcaaatgcctacgtatctctatcttatattaatagtgcaaattcaaccgtaaccgcagattttcttaatgtcaggtccactccagaggtaaagagcaataatattataggaacagtgacaaaaggttataaggttaatatcattagtgtagagaataactgggcaaaaattaaaatgggttggcggaaagcaagcgaggaagaagtttcctactatgtaaaccccgcaaacttttctgtgtcagataaaagttattttcagtttttgaagttatcgaaatatgcaggactgacagcatcagaagtcaatacgaagattttaaaagggaaaggaattcttgaaggaaaaggtgaagcttttattaaggcagctgaatctaacagtattaatgagctctacctgatttctcacgctttattagagaccggaaacggtacctcagagctggcaaacggtgtgacctataatgggaaaaaggtatataacatgtatggcataggtgcatatgacggagacgctgtgaacaagggtgcccaatatgcatataaccaaggatggttcagtcctgaagcagcgattactggaggagccaaatttatcggacagagttatatacacaatgccgtatacaaccaagataccttgtacaaaatgagatgggagccttctgtaagccaccaatatgcatctgatattggttgggcgtataagcaggtaaacagaatgtacagtctctatagtctgttagataactatcagctttactatgatattcctgtctataaataaacgtgttaaagagctcggagtcatacttccgagctttttttaatattaaattggacagatgtctttttgtttgtacgattatttttaagcactatggaggcaatataaatatataaaacacctgttcaattgtgtgaacaggtgtttttgtatgttatttgttcttctgcaaattggagaagtttgctgctcgaattcccatctgaatacatattccatttgtccgagaacttcttcatttcttctgcacgaaatggctttttcgtcatttcctccagaagggcttcgctgtcatgacaagcctttccgggaatgacggacgtataattgtcgattaaaccgcgcttttgatcatattcctccagatcatacgtgaaaaagaaaatcggtttatttaagagcgcgaattcaaaaggcacggaagagtaatccgtaattaaaatatcagcggctttcaagagatcatgaagacgcatgtcagacacgttcttgatcaattcgctttcaaacgaagccgaaatctgatgcaaaacggcaggatgaagctttacaagcagcatatactctccgtttaacgcgtttgtgagctgttcttcggtgaatggcagccgaaaggattgcatatcataatccctgaatgtcggtgcgtacaagatgatttttttcggccatttgtgcttcagttcgggcttgtgttcttcataatagacgtcagtcagggggacacccgtttttaacagctggccgtcccgtatgccgaacgactttttaaaaacgtcagccatcgcgtctgagccgacggtgacaaagtcaaacgaacggtacacttttttaaagcggctgatgtctgatgccgggcggttttgattcgtcacatcctcaaggccgaactttttcaaagagccgttcgcatgccacacctgaatgcatgtcgtttgcggccggcggtttaagacgcttgtcatgaggaaatagttatccgttatcaccactttgctcttaaaaaggatcaaaacagccttcaaaagatgcagcggatgtttttcgttcagataaaaagagccgacaccttccagctcttttttcagactgacggcgtgtctcgtatacaaaaccgtcacttcataagaaagcgattcagcgtgcgctttgtaagaacggatgagagcttgcgcattctcttcaaaagataccagcagggtcagatggttcttgggctttacaggcttgaacaaaacgccgagaacagacagatatatagaataaaaagcggcgaataaagatcgcaagttcatagattaccaatctcttttgctgttttatttgtttaaagctgtttcgtttgatcttctgcctgcttggaatacaggcttttatttgatttattatttctcaaaacggtaaaagcatacttcggaatgttcagcatccttttccatctccacggattcgtcaccagtctgtacagccattccagattcgttttgatcatccattcaggggcgcgtttcaccgttccgctgaacacatcaaagcttccgcccaaaccgatcgatacagcctgagggaaaagatgtttgtattcataaataaattgttcctgatggggatatcctaaggcgacaaacacgagatcgggtttcgcccgggaaatctgtttggcgacgaagcgtttatccgcttcataaccgttgctggctccgacaacctcaatattcggatactctttgctgatccggttcaaaacggcgtcaagcacgtcttgtttagctccgtataaaaatatttttttagactgccggtttgcgaggccgagcagtgcaagaaacacatcgaatcccgcaattcttgatttcagcgggtgctgcgtcaaacgtgacattaacacgacgccgataccatccggcaggacgaaatccgcggatgaaatgacttgatgataacctttgtctttcgccgcagcgtatccgatctcaggattgaccgtcgcaatgacggctccttgcttttgtgcgatataataagtgtctaaatatgaaataaactcctgtaaatttccattaacataagaaaggttgtgcaccatttcagtctgcatctgccgtcctcctttttgtacgggattttctttcactttttcgtgacttaggctaagctttattttaacataataccttcagataaacttaacaatagttttacaaaaatataaataagataacaatttctttaatcatacgcgcaaaaaccctgctaaactcctattgtaataacatttgttaataagtggattttaacttcgttttacattggcttaaccttttcagggctatgtgatataatgaggttccatgagtacgaaattggcactttagtgattaaggatacagctgcgcagcatttcagggcagttgcttgttatacgtatgatgatagaaaggagcttttgtttcatgaagaaggtcattacttacggtacgtttgatttactgcattggggtcatattaaactgcttgagcgcgcaaagcagcttggggattaccttgttgttgccatctcaacagacgagttcaacctgcaaaaacaaaaaaaggcctaccacagctatgaacacagaaagctgattctggaaacgatccgttatgtcgacgaagtcattccggaaaacagctgggatcaaaaagtacgtgacgtagcggatcacaaaattgacgtgttcgtaatgggagacgattgggaaggcaaattcgatttccttaaagatcaatgcgaagtcatctatctccctagaaccgaaggcatttccaccacacagattaaaaaagaaattgccggggtgtaatacggaattattgaatgtatgaactgtttaaagtacttcttatttgttgataaggagtactttttgatgcttaaataggtttgttataataatctgagggaatagtattattttgcagtgttttactaaattccatatggtgaaagggagaaaaaatttgtccaatcagcctattaacgataatcatgagcttcccgatatgatgtattattttatttcaggaggcctcccggatgattacggaggtctgaccaaatcactattattgcgttctaaactattcggagaagagagtcaaaagaataccgcctttcttacttttaaatttgatttggaatttcagagaaaaaaaaacgagctctttgaaagaaagaaaacggaccctcaatatacacaagttatcaacatgtacgatgactttttaagtaaaaaaacaaaaggcaagcggatttattcggagaaaattgagctgaatcaaataaaaaaacatgtcagtaaggggaaagtaagcaaaactatctcaaaaatgttcggaaaatcctcaaacgattataatctttcctattattcaggcagtgatgacgtgcgttacgtagattacctgattgatgaaaaacaagtaatcaaaagggaggaatacaataaagaaggaaaacccgtcattgtctctcattttgatacaaagacgaatcaaatcttccttcaggagtttatcaacaacgaaaatgtcgtttatctggaaaagcacttcatgtgggatgaccaaagtgaagcagtcaaattcacacatttcacttggtactcagaagaagaccctttaacatttaaagatgaatttgagttgcgcaggcattggattgatattctccaaaaagaaaacgatcggcctaaactatttctggtcgacagcagactacaggataaacatgtcttcagagtgaaaaaagcgccgtcatcttattatgccgcgattattcacaataaacattatggtgataataagttccagatcaaaggacgctataaagaacttttcggccaaataaataaccttgatgccgtattttttatcactgaggagcagattgcagatttcagtttgatttcaggggaaaaagagacattcttttttacaccgcatacgatcaataaaccgcttgatgaagaggttttgaaagttccgagcgaacgaaataaagcggttattatctctcggattgtaccaatgaaaaacctaacgcatgccgttaaagcgttcaaacttgttgtaaatgaaatcccggatgcgaaactggaaatattcggttctggaggagaaacagagaaaatcaaaaaggaaataaaagctcaaaaccttaagaataatgtgttgctgaaaggatacacgaacaatcccgattacgagtttcaaaaagcgtggctgacaatttcaacttctcactttgagggcttcggtctgtcaaacatggaagcgttgagcaatggatgcccggtcgtaacttacgattacgattacggtgccagaagcttggtgaaagatggagtaaacggctatgtaattgaacaatataatatagaaaagctggctgaggccattatctctttaatgagagatgacagcactcacaaacaattttcacgtcaagcctttaaaatggcggagaaatactctaaaccaaactatattaaaaattggtcatatgctcttttcaaaatggttgaagtgagaaaagaaaaggaacggcttgctgaaaaagtcagttctaaagaacacccgatcacatcttttaaaaaaaacggcaatggattggcgatcagcgttttagtgtctgaccagaatgatgcatttgaaaaagtccgaatggttgggattgatcgaaaaaacaaagctgaaatcatatccgtatccgctgatcaaccgactcagccattttatatagattttgaaaaggacatcaaaaaagaaaaaattgacgcaaatcatacttcggttcttgacttttacattcaatatataacagctgaccatatccgtattctaaaaagggtatccagccgtgaagtcaatttcggcgaaaaagatcggtttatgaataacggatatactttcgaaccttatacgactgtgaaagggaatttctctattaaattaaacaaaaaggatcacatcgattaagtgaaatcggttaagtggagagctttaattcagaggagcagaaaataagtatggatgaaaataccgtgagcaaatgtattttgaaaagcttaaaaaataatgtgggagacctggcactctctatttcacttgaaagcgaagaaccgttagctgaggaagtgaaatgttatttaaaattagtagaacggcgttccggagccgaggatgttgttattttagagaaagagagcccggctcaatacagtgcatcaattaatattcactcgtttcctgaacctttagaaatgggacagacttatgatttttatgtggtacttggtgaaccggaagcaaatgaggaagaacagccgaagcaggtgcgtttatctgtggaagctgaagcgattgagcgtgcctaccaccttgatcatacgactgagctgttaattttgccatatacaactgataagggaaatttttcctttaaggtaaaaagagaagcgaagattgtgaagtttgatgagattcagctgaaggcagaagagattatgatttcagggtatgcagggtatctaagttcggagaatcagctttcagttaaaaatctgcaatttgtcattaaaaaaggaggagaagaccctgtagaaaaacatttccctattgaaatgacgaaaaaaacggagaatattgaacagcttcgggaagatgaattcacccctgaaatttttgatttccaaataaaaattccattaaaagatattccttattctctggaaaaacgatttgtctaccgtatgtttatggagtttcattgtgaaaacgacgaagctgaacctattgttctcagcagcactccgcttgtgctcggagacagaaaaaataaactgaaaggcctcataagcgttgtgaataaagacagcggaccggtcaggtatgaggtatataaaaagaagaaaaagcagactgtctgtatccgtgtgaacgactacagcctgaaaacaaggatgagatacttcataaaagggaagaaaaaacgtttcatttccaaaatgaaaaaactgaaaaaacgaagaaattcccttattacgaaaggttataaagttgttttcagaatggcgagcaaaatgcctgttaaaagcaagaccattatttttgaaagctttaacggcaaacaatacagctgtaatccgagagccatttatgaatacatgcaaatcaatcacccggaatataaaatgtattggagcgtaaataaacagtatgcagcgccttttaaagagaagggcattcaatatattaacaggctttctatcaagtggctgtttgctatggcgcgggcagaatattgggtcgtcaacagccgtctgcctttatggattccaaagccggaacatacaacctatcttcaaacatggcacgggacgcctttaaaaagacttgcaatggatatggaagaagttcatatgccaggtactaatacgaaaaaatataaaaagaattttattaaagaggcatccaattgggattatttaatttcccctaatgcctactcgtctgagatatttgcgcgcgccttccaattcgataaaactatgattgaatcaggctatccgagaaatgattttcttcataatgacaataataatgagacaatcacagcgataaaaagaaggttaaacctgcctgaggataagaaaattattctttatgcgccgacatggagagatgaccagttttatgctaaagggcgttataaatttgaccttgatttagacctgcataaattaagggaagagctcggggatgaatatctcgttattctgagaatgcattatcttgtggccgaaaattttgacctcggtccgtttgaagggtttgcttacgacttttctgcacacgaagatattcgggaattgtatatgatttcagatctgttaatcaccgattactcttctgtatttttcgattttgcaaatctgaaacgcccgatgctgttttttgttcccgatattgaaacataccgggataaactcagagggttttacttcgattttgagaaagatgctcctggtcctttagtgaaaacgacagaggaaacgatcgaggcaattaaacatatttcatcaccggattatcagcacccggtttcattcaaacctttttatgacaaattctgttaccttgagtcaggacattcttctgagaaagtcgtaaagattgtgtttgaatctgaataatagaaaaacccctttgtatcaaggggtttttctattatgctttacaaaccttttagcagcatttgcatgcggcttgaaagtgaaaaaaaatttgatttctggtacaattatcagcgatgctttataaaatcaaatcaacctaaggaagattaaaatgaatgctgtagtgaaaatactaaaagagcaagtaacatcatttcctttaatcatgcgattagcggcctacgaaacaaagtctaaatatcaaatgaattatttaggcgttttatggcagtttttaaatcctcttattcaaatgctcgcctattggtttgtttttggattggggatcagaaaaggggggccgatggctacaggtgccggagaagtgccttttattctgtggatgcttgcaggtctgataccgtggttttttataagcccgacaatactggacggatcaaatagtgtatttaaaagaattaaaatggttgctaaaatgaatttcccaatcagttctttgccgtctgtcgccatcgcttctaatttgttcagttatgcaattatgatggtgatctatatcattgcattgctcgccagcggaatctatccgagccttcattggcttcaatatatttattattttgtttgtctgatggctttcttattttcgttcagcttgtttaattcgacaatcagcgtgctgatccgagactatcagtttcttctgcaggcagtgacaagacttttgtttttcctcctgccggttttttgggatattaactcaaagctgggggcagctcacccggaattggttcctgtcttgaagctgaatccgcttttttatataattgacggtttcaggaacagcttattagatggccagtggttctttcaagatgtgaagtatacactgtatttctggctgttcaccttatttttattaacagtcggttctgttttacacatgaaattcagagataagtttattgactttctttaatacgtaaggagattgtacaatgaaactaaaggtttcgtttcgaaatgtttcaaagcagtatcatctttatgaaaaacagtcggacaaaataaaaggtttgtttttccctgctaaagataacggttttttcgctgtgcgaaatgtctcctttgatgtatatgaaggggagacaatcggctttgtaggaattaacggatcgggtaaatcgacgatgtccaatctgcttgcaaaagtaataccgccgacaagcggtgaaattgaaatgaacggccagccgtcgctgatcgcgattgcagccggtttaaataatgctttgacgggccgggataacattagactcaaatgtttaatgatggggctgaccaataaagaaatcgatgagatgtatgaaagcatagttgagtttgctgagattggtgattttattaatcagccggtgaaaaactattctagcggtatgaagtcccgcctcggctttgcgatatccgtgcatatagatccggatattttaatcattgatgaagccctctctgtcggggatcagacattttatcagaaatgtgtcgaccgaatccaggaatttaaagaacgaggaaaaaccattttctttgtgagtcattccatcggtcagattgaaaaaatgtgtgaccgtgtggcttggatgcactatggtgaattaagaatgttcgacgatactaaaaccgtagtcaaagagtacaaagcatttatcgattggtttaataagctctccaaaaaagacaaagagaaatataagaaagatcaggttgctgagcgtaaaaaagaatcgcctgagcagcaggcaattgtgaaggaacaaaagaaaaaaaataaatccggatcagcagtcaatgctattcaaattgctattttatcaatactgcttgtgtttatggccggaaccatgtttttcagcgccccgcttcgtacgatcgcttcgttcggtaagatcggatatcaagatgatgttaacaaggggaaagaccagatattggtgaacaaaaaaggtttcgtattaaaagaccagacgcaggcctataaagatacagagctgaaaaaaaaggcggacttccttattccgttcggtgctcaggtgaaagtggtatctgaagacaggcaatcagcaaagattgaggtcaacaataaaacgtactatatcccgaaaaacgcagcggtctataacgaaaaaaattcaaatgtgaaagcatccgctttttctccgtatgtaaagcagggtgatgctgatcaacttgtgtcgcatctcggtgagcgcgttaatgatatccagcaagaaatgaaagagctgcagaaagaagtggtgaacggccgggagacgctatatcttaaaaatggcgaggtcagttatgcagtgaataatggcaaggccgagcagcttgttttcagaggaatatcagctattactccggcagatctatccctgaataataaaggtgttataaagggcagcagtgatcggcaatttattgcggcaaatgataaatacgcttttattatcaataacgataatcaaactttaacctgcattttaaaataaaaagctgttggaataaatccaacagctttttttcttataattcatcttttcttaacaggtcttccatgaaagggataaggtgatcacgcagttcacgatcctgcatcgcaaattctaatgtagtggtaataaaacctagtttttcaccaacatcatatcttttgccctcaaaatcgtaagcaaaaacccgctggatttcattcagcttttgaatagcgtctgtaagctgaatttcccctccggcaccaatttgctgttcttcaagatacatgaagatttcaggagtgaagacataacgtcccagtattgccagattggacggagcagtcccttgagccggcttctcaacaaagttcttcacctgatatctgcggccttcacttgtcagcggatcaataattccgtaacgatgggtttcttcttcaggtacttgctgaacccctataatagaagaaagtgttttttcatattcatccatcagctggcgaagccctggtttttcagcttgaacgatatcatctccgagaaggacggcaaatggctcatcaccgataaaattacgtgcgcaccaaacggcatgtccaagaccttttggctccttttgccggatataatgaatgtcagcaagattagaggcttttcggactttttctaagagttcggtcttccctttttcttctaggtttctttccagctctggtgagtaatcaaaatggtcttcaatggctctcttgctttttcccgtaacaataataatgtcttcaatacccgcttcaaccgcttcttcaattatgtattgaatcgttggtttgtctacaatcggaagcatctctttcggcatggcttttgttgccggcagaaagcgtgtccctaaacctgcagcgggaattatggctttgcgtacttttttcactttaaagcaccttccttagcatcacttaaatataagttatgatatctatacagactcaggcttgctgatattttctgtatacccgatatttcatttttaacacttttaatgatataagataaaccattattaaacaagttttatccgtaaagccttaatgatatatcctttttcatttaggggaaaaataatacaagatatttaaccggcggatcatatcgtgtaaaatgggttgataatgaaaaatgatcacaaacttgatacaggagaaagagatatgaaaaaacttaaagtcatgacggtattcggtacaaggcctgaagcgataaaaatggcgccccttgtgctcgaattaaaaaaacgccctgaaatagaatcatatgtcactgtgactgcccagcatagacaaatgctggatcaagttcttcacgcatttcaaattaagcctgactttgatttgaatattatgaaagaacggcagacgctggctgaaattacttcaaacgccctggtaaaactggacggcctgtttaaggaaatcaaacctgatattgttcttgttcatggtgacacgacaacaacctttgccggaagccttgcagctttctatcaccagattgcagtcggacacgtggaggccggattgcggacgggcaacaaatattcaccttttccggaagaattgaaccgccaaatgaccggagcgcttgctgatattcactttgctccgactcagcaagcgaagcaaaatttattgaatgagaataaaaaagaaagctccatttttgttaccggaaatacagcgattgatgctttgcatactacggttcactctgaatattcccataacattattgagaaaatcggcaatgacagaatgattttactgacggcgcatcgccgggaaaatttaggtcagccgatggaacatatgtttaaagccatccgccggatcgcagatgaattcagcgatgtgcaagtcgtttatccggtacacctgaatcctgctgtacgtgaagctgctgataagcattttggtgattcggagcgcgtccatttaattgaacctcttgaagtgattgatttccacaattttgcgtcaaggtcgtattttattttaactgattcaggaggcgttcaggaggaagctccttccttaggaaagccggttctcgtattgcgcgatactactgaacggcccgaaggagtggaggcgggcactctgaaattagccggtactgatgaagaaacgatttatcagatggcaaaacagctgctgacagacaagcaggaatatgaaaaaatgtcgcgggcatctaatccctatggagatggcatggcgtcaagaaggattgctgagggactgctctatcaattcggactgcgttcagagcatcctgattcttttgaagtgtaacaaaaaagcagctccgcataaattatgcgaagctgctttttctgcattagtttaaaggttgaggctgcttctcaattctttagtaatggaagcaagaccgttttcatctgctttataatagtaaattccgttgattttggtgccgtcacccttcagctcatgctgaatcactttcttgcgggcatctttatagccggattgaatatcccacatatcatcaaaggttaaattcgtttttacattgttctctactactttaaacatatctccgaatctcgtgacagaagagatacttgcccctttattgataataccctctataatctggcgctgtctgtcttggcggccgaaatcccctttaggatcttcttttctcattcgtgagtaagcgagggcttcatcaccgtttaatgaaatattgcctttgctgaaggaataaccgtcatagttgaaagcgaatgtactgttgacagtgatgcctcctaaagtgtcaacgacatctttaaagctttccatgtttactttaatgaaataatctacaggcaggttcaagaaattctccacagtatctactgccatttgcgtaccgccaaatgcatatgaatgattgattttatccatcgtgcctttgccgataatttttgtataagtgtcacgcggaatactgaccatttccgttgtttttgtctttggattgactgtaaggtaaatgagcgagtcggcccttcctttatcatttttacgttcgtctactcccatgatcaagacagagaacggttcgtgtttatttattttcacctcagtcctgcgtttattcgatttgttaatgtcttcgtgaatgcttgcgacggttgatgccgctttatgccataggtagtatgtaaagccgccggaaactaaaataaaaatgccgatgattgtcagaaagaccagtaaaaaagtctttttcttttttcttcgtttacttctcatctcaatacacctcatctgttttaattggaaatcgggactcccagcaaatgtatttttttataatagaatacaataaatcctaatatagtcgaatgttatcgaaaaaagtttcaatgtttcttaatttttctttaaaataataatatattgtcgataatccataatgaggtgaaaaaaatgaaaaaaatttttggatgtttgttctttatactgcttctcgccgggtgcggagttaacaatgaaaaatctcagggcgaggatgcgggtgaaaagctggtcacgaaagagggcacttatgtaggactggcggatactcatacaatagaagtcactgtggatcatgaaccagtaagttttgatatcactgaagaatcagccgacgatgttaagaatttggataatggcgacaaagtgacagtaaaatatcaaaaaaatagcaagggacagcttatgctgaaggatatcgaaccggcaaattaatgaacagggggacgctgtaatcttgaaaacttgcaaacatttaataggactgactctagctgttgttatattgcttataccggcggtttcctttgcggcagattcaaatatatctgttaagctgacaaattacatagggaatcaatcaagcatttctttatctccaaccggtttttatcaggttaccggtgatcatgtgtctgtaaccaaccgcttttcgggggcatcccgatatgagacggcggctcttgcatctgactctcaatggacgaatcctaaaaccgttattctcgtcaatcgtgatgtttttatcgacgcattaccagtaattcctctggcaaaaaaattggatgcgccggtgttatttacacagccggacactttgacgaaaacaacagaaaaacagattgctaagttcaatcccgataatattctggtcatcggcggggctaaaagcatttcaaaggacgttgaaaataagcttaagtcttatggagctgtgaaaagaatcagcgggaaaaaccgttatgttctgtctgaaaacattgcaaaacaaatgggaaattacgataaagcaattgttgtaacagggaatgtttttcaagacgctttagccattgctccgtatgccgctgcaaacggctatcccattttactgactgaaaaggataaattgccggattatgatcttccgaagcaagtcataattatcgggagttcgttcagcgtgagtgatgctgtagaaaatcaaattaaaaaaacttcaactgtgcagcgaatacccggatcaacacggtatgaattgactgctaatattattaatcagctaaagttgaaggctgataaagtcgtcatgactaatggaacgaaatatgctgatgtcctggttggcgcttctttagccgccaaaaaaaacagccaaatattatatatcaaacaagatgatgttccttcagcagctaaatcagtgacaaaagagaaggcgtcgtatgcatacgactttatcggaagtacaagctccatttccgccggggttgaaaatgagctttcaaaccatttttacttagccggcgggagcacatacaacttacaaatcaataatggaaagttaaatcttaatcatattaaaacatatgggaattcattgagaataaaaccggaaacgtacaatgaatccaaccggatcagtttgaatggaaaagaatacttggggacggttaatttttcaatagagtcaggcaaatatatcagacctgtaaatgaaaacattccttttgaagattatttaaaaggtgtcgtaccgaatgaaatgcctgcaagctggtctcttgaagcgctgaaggcgcaaacggttgcggcaagaacatactcaattacgaagaccgggagcactgttgctgatactactgcttttcaagtatatggcgggtacagctggaatgccaatacaacgaaagcggtgcagcagacaaaaaataaggtgctgacttacaaagggaatttaattacggcggcttattcatcaagtaatggcggttatacagaatcaagcggcgaagtgtggggttcaagcgttccttatttaactgcgaaaaaagacacaaaagatcctcaaactgcctggagtctgacgctttctaagcagcaaatcaatccggattcaattgatgtaaataagccggcctcttggtttgcttcaaagaatgagacaaatgcatctcaactgagcggtattaaaaattggattttgaaaaataaggaaacaggcgcttccgccattaaaattttaaaaatagaagattttacattcagcggaacaactaaaggacagcgggctaaaacagcaactttgaaagtgaattacgctgtcaaacaaaacaatggaaattacgaggcaaataaaacatcttcaatgactgtgccggtgactgaattgagaacgatgatcggagcctccgtgtttaaaagcacttatgtgaccgtcagtcaaaacggttctgcttttacaatcagcggaaagggatacggacacggcatcggcatgagccaatacggcgctaaggcaagagcggattcaggagattcatatagttcaattttaaaattttattatccgggcaccacattgactgactattaaataaaagagagcaggaggaaggcaattgcgttcttatcttaaagtcctgatcatttctatgctgggactcatcttatttatcccgtcagccttagctgacaacgcggttaaaagagtagggggaagcaacaggtacggtacggctgctgcgctttccaagcaggtgtattcaacagcgagtacagctgttgtcgtcggcggaggttcgtatgcagatgctatatctgctgccccgatggcatatcagaaaaatgcgccgctgctttacacaaacaaagataatttgtcatcagagacgaaaacccgtctgaaagaattaaaaacaaaaacggtcattattgtcggcggaacgcctgctgtgtcagcaaatacagcaaatcaaatcaaagcgctcggcatcagtgttaagagaatttcaggaagcaaccgatatgatacggcagctaaagtagcaaaggaaatgcctgccgcttcaaaagccgttattgcaaacggatttttatatgctgacgcaatagctgcaattccatatgccgcaatgaacggatatccaattttgtttacgaatcaaacagatatcaacagtgccacagcaggagctataaaaagcaaggggatcaaaagctctattgtagcagggggaaccgggagcataaatgcctctgtctttaaaaaactcccttctccaaaaagaatcagcggaagcaatcgatacgaacttgcggccaatctagttcagcaattaaatcttccgacaggcaatgtattcgtcagcaatggtttcgggtatgcagactccatagcgggtgctgctcttgctgcaaagaaaaaacaatctatcattctgacaaacggcagcaatctttcaaaagaaacaagagtcatcatcgggagaaaaaaattaagcagctttaccattatcgggaataccccggctgtcagctcaaatgttgcaaaccagctgaaaaatccggcagcaggaaaaacaattttaattgatccgggtcatggagggaaagattccggttctataggtaacggcattttagaaaaagacgtcaatcttgatatcgctaaaaggctgaatacaaaattaaatgcttcaggtgctctgccggtcatgacgaggtctaatgatacattttattccttgcaggaaagggtaaataaaggtgcaaccgcaggagcggatttattcatcagcgttcacggcaatgcaaatgatgcaacttctgcaaacggaactgagacctactatgatgagacatatcaagccgctgcaagcaaacgcctggcaggacaaattcagcctagggttgttaatgcattaaaaacaagagacagagaggttaaaacagctccgttctatgtcattaagtattccaaaatgcctagtgtattagtagagacagcttttattacgaatccgtctgatgcaagtaaattaaagcaagcatcctataaggaaaaggcagctgcagccatcaatgatggaatcgtgtcttattataagtgaaacttttatatatttgtgtacgagcctgctggtcaaaattgatcggcaggctttttcgttgttttccgctcataatgatccttttcaattatagtaaccgctgtttatggatatgaatagatttacaataaaaaaacaataatcgaaacattctaataaacattaacgcttcctttacttccaattaacatccatctgctaaactcacggcataggtcatcaaacatcccaacaaatcgtgaggtgtgtgtcagtgggagcagagaaaagcatgaatgtaaataataactatgcagtgcggcaggggacttccgctgccgttacggaaagaacggcccgttatttggcttttaagcgattcatggacattgtgtttgcgcttgcggggctcttggcggcgctcccggtgatgggcctgttctccatactgattcgtttggagtcgcccggcccggctttttataagcaggagcgggtaggcaaagacgggaagccgttttatttgtataagctccgctctatgaaaatagatgctgaaaaatcgggggcggtctgggcgctgaaaaaggatccacgcgtgacaaaggtcggcgcttttatcagaaggacccgtattgatgagctgccgcagctgttaaatgtgcttcggggagaaatgagcctgatcggcccgcgtcccgagcgtcccgtgtttacggaacagtttcaggccgagattccggggtttacggagcggctggccgttaagccgggattaagcggctgggcgcaggtcaacgggggatatgacatgacaccgagggaaaaactgatgtttgacttatattatatccgcaacctgaccttttcattggaactgaagattatgctcaaaacgtgcaaagtgatctggaccggtgacggggcgcgataaaaattctggtcagcagacaaaaaagtagggaaaacgatgcctagtattacaaatcaaatcttgagcggcgccaaatggacaagtatttcgacagcgtgtattacggtcattcaaatcgtccaattcgccctgctcgggcgggtcatgtcactggctgaattcggccttgtcggcatgatcacaacggtagtggtgtttgcccaaattgcgcttgatatgggttttggcgccgcgctcattcaaaaagatcatgtgactgataaacagatgtcttccttgtactggctgaatatcataacggggcttgcgctgtttgcgctgctgtttttcagcagtccgctcatcgccgatttttatcggcgggaggagcttgtctatttaatccgcgtgctggccgtcatgtttttaatcgcgccgatcggtcagcaataccagtatatgctgcaaaaagcgctggcatttaacacgctaagcaagattgaaatcttttcaaatgtgctgtccttcgtgtatttggcggccgcggttttttatacggacccgattctcgcctatgtgatttcccaggtgctgctgcaatcgtcaaaaggcattctgtactggatgtcctgcagaaaaacatggagaccggcgttcgtttttgatctgaaaggaatgaaaggcttcttttctttcggggcctttcagctgtcttcccggcttgtgaaccggctcggagcgaatattgatatgattctgatcggcagttttatcggcgccgaggcgctcggcatttacaatctggcctaccagattgtcacgcttccggtattaaaaattaatccgatcattacgagagtcgcgtttcccgtctttgcgaaaaacaagcatgaaaacagcgttatcagagaaggttttctcaatatgaccaaaatactcgcgctgatatcctttccgcttttgctcggtttggtttcagtgtcggatgcattcgtggcttcggtattcggagaaaaatggctggcggctgtcccggttttaaacgttctcgctatcgtcgggattttaagggtcctgatgaatccgaacggatctgtgctgctcgcaaaagggcgggccgatctggcgttttattgggacgccggggtgatgctgctgtatggtgcatctttgtacgccgccgtgctgtccggaaatctcttgacggtagcctggacgtacgctttcatcagcatcctgaatttcctgatcgggcgctggctgttggcatatgtcattaagctgcggctgtcggcttacttcaaagccgtggccaaaccgtttctgcttacggcggcaatgggtgtcatcgcttttacagccagcttcggaacagagcgcatcagccttgatgtcaagctgcgtctggcgatctccgtagcctgcggcgcattgtgttatttattcctgttaggaaaagcttatccgcatatgaaaagtaaattaagaaaaggacgtttgctatgaaggtattgtggatgacaagtgtctatccgagcagtgagaagccgggggaaggcgtttttcatgaaacacaggcgcaagaactgagaaagcttggcgcggagatgaccgtcatttgtccgcggccgaaactcgccgcgccattccgggtgctgaaaaagacatatcggaaaaaggatatcaggccggcgcatgaatggcggaaaggcgtgtccgtccaccggccgttttatcaggcggttcccgggcagctgaaatgggcccagccgcataaaagaatggcgttatcggttctttccgcgattaaaaatcatggcctgaagcccgatctgattcacgcgcatttcgccatgccgtcaggcggagcggccgccattgtgtcaaaggctttaggcattccgtatgtgctgaccttgcatggcagtgatgtcaatgtctatccgcattacagcaaaagcgctcatcgcgcatttacatttgcggtgcgggaagcagccgatatttacgctgtgagcggcagtctgcgggaacaaatgaaaaagctcatcgaagcggagtgcagcgtgcttccgatcggcatcacgcttgacgccttccgaaaaaggaacgagacgaaagaagccgtcagaaaacggctcggccttcctccggataaaaaactgatcgtgttcatcggcaggcttgtcaaagagaaaggtgttttcgacttatcaaaagccgttcagtcattggatgaaaattatgaagccgtctttgtcggtgacggtcccgccgcatcttcattgcgggaagccgctcatatcgtcacggggcaagtgccgaacgacaaggtacaggactatctgctggcctcggatgtaatggcgctgccgtcctacagcgaaggcatgtcgactgtggtcattgaggcgctcgctctgaaggtgccggtaatctgcaccgatgtcggaggattggcttctttattcgggaaacaccgggggttgctgatcaagccgggttcacctgagacgctggcagaatcgattctgcaatatgacgaaggagaggcttggacgccgcaaacagccgaggaactttatcaaaccgtccgcacgtattttgacgcaagccaaaacgcgaaagcgctgaaagagaaataccgatccgtaatgaaccgggccgggcaagaggagaacctttcgaaagagggatgaagctgtgaaaaaaatcgctgtattaggaacagggtatgtaggtcttgtatctggaacttgttttgcggaaatcggccatcatgtgacttgctgtgacatcaatgaagcgaaaatcagaagcttgcaaaacggagtcatcccgatatatgaaccggggcttgaggaattagccgaaaaaaatgtcagtgccgggcgcttatcctttacggccggcattgagccggctgtgaaagccgctgatatcatctatatcgccgtcggtacgccgatgtcaaagacgggtgaagccgatctgacctacattaaggcagcggcgcaaacaatcggagaacagctgaacggatacaaaatcattgtcaccaaaagcactgttccggtcgggacgggaaagctcgtttaccaaatcgtcagcgaagcgtcaaagggaaaatatccgtttgatgtcgcgtcaaatcctgaattcctccgcgaaggttcggcggtgcgggatacgatgcagatggagcgggcggttatcggcgccacaagcgaacatgccgcttcggtcattgaagagcttcataagccgttccgtacgaagatcgtaaagaccaatcttgaaagcgcggaaatgattaagtatgccgcaaatgcttttttagccgccaaaatatcttttattaatgatatcgccaatatttgcgaacgtgtcggggcggacatttcccacgtgtcagaaggcgtcggtcttgacagccggatcgggaataaatttctgcaggcgggcatcggattcggcggatcctgctttccgaaggatacaacggctttattgcatatcgcaaacgccgccggctatccgtttcaaatgatggaagccgtcattgaaaccaatcagaagcagcgggtccgtattacggaaaaattgaaccgcgccatcggtcccttaaaagggaaaaccgtggccgtactggggctggcctttaaaccgcacacaaatgacgtccgctccgccccggctcttgatatcatcacaagtcttaaaaagcagggcgctcacgtgaaagcgtatgatccgatcgcgattcccgaagcgtcagcgatattaggagacggcggcattgaatatcacacagagctgtacagtgccatcaaaaacgcggacgcatgcctgattacaacagattggccggaagtcaaggagatggatcttcagagagtgaagcagctgctcaaacagccggtcatcattgacggcagaaatatgtttccgttggagtatatgagggtttcaggattcacttatcattccgtcggacgtccggcggttcatgccgatcggcaaataaaagaactggcaagatagaaaaagatttgtcttcaggctctcggcagcccggctcggctgccggttttggaaaggggtttgccatgtgagtatcaaacgttcagcggcacatgttcttgtgctgcttgccgctctcattacaggaggatttatcatgctggaggcggtcagggcggatgccggcttcggaaaaatcaccgtgctgctgcttgccgccatgatcggcattgccggacttgctttgctatccgcctttacaacaaacggtcagatgtttatggggctcatttatatactgatcgcgtgtacatttttaaaccaggccttctttgcggttcatctcggatttttcagcttatttatataccggctgttattaatcggagcaggcgcccttcacatcgccggcatcctgacaaaccgtcatcatattgacagatggaatcgggtgaatgtaaaaggggttctgatgtttttcgccttatggtttacatacggtctcctatcgttattgtgggcaaaatccgtgacgtacgggattaaatatttagctttaatgggaatgggcatgtttctgatttatcttattgtcatgttcattcagcgctttgatcagctgatggttttttacggcatatggcttgtgatgaccatctttgtgatggcgatcggcttttacaaccattttacacacaaccatctgccgagctccacgctttataacggcccgcagtacaaacagcattatccgacgtccgttttctttaatcaaaatgatttcgcgacgtttttgtgcatcagtttctttctgtatgcggcggcggtgaaaaatatgaaaaacggctatgtgaaggccgtcagtctgctctttgcgatcagcgctttgtatttaatcattttgaccggttcgcgcgcgagtctgctgggcatatgcgcgggggcggctgtatacgtcttcatcctgctgccttccctgttgaaaaaactcgcgctgtacgctgcgggagcgggtgcggcgctgtttgcggttttatttgcgggccgtatcaccaacgccatcttgaatctgttttcagctccgcaggcgatgccgggacagcaaccgcttccttccaacctcgcgagggcgaatcttttaaagaacgcctttcactatgtgattgattcctgggggttcggagtgggcgccggaaacgtctcgtattatttaaaagcggagcccgtttatgatacgggcggcgtagttgaggtgcacaactggctcgtcgagattatggcgaacttcggcgtgcttccgatgctcggttacctgacagtctatttgttccttttttggacactttataaatgtcatgaaagaaaatcggaaaatcagtcaagactgatcacagaaggacttatcacggcgatggccggttttttggtaagcagcatcagcccaagctccgtatcaaatttatttttccactgggtatttctctcgctcgtgatcgcggcggtcaatatattgaggcgtttacaaaaggagcctgccgtcacggcgtactatgaaaaacagggagatgcgagatgaaggatatgttgacaagaataacccggcgtatcaaaaagaatatcatttggatcattgcgctgcccgttgtgttaggggcggcgggatatgtattgccgtcaaaaatcagcggaaacaacagttttacatcagaagccgcgatcgccgcgggaaactatgatcatccgctttataacaatacaaaagaaatcccgctccttttgacgagcgatgcctttttaaagcaggctctgcctgataaaacagatgaagaaagagcggccgtgaaaagtaaactgactgtcgaaacacaatcagattcattgatcacggtcagctacagcggccaaaacaaacaggacactgaatcggtgtttcaagccgtcataacaacttttctgaagaatgatcaggacctgtttgaaaaacgggcaaaagtagtgcggcagagtattgctgcgcttgaaggagaaaccgtcagcgcggacgccaaagtggataaggaacgatttttatacgaattgaaaaatacgcagctgaacctgaaagcggccggcatcatcaattcagagccgatgaatgaaacggcgggacaaggcatgccgccgaaaaagaaagcggttctgggcgttttaatcggcattgcagttgcatttatgttcattgtcattcctgagttttttagagaatccttgtaaaaatctgcgatggagatgtgaccatgacaaactggaaacctttcgtatctgtcattacaccgtcttataacgcaagtgaatatatcgaagacacgatccagtccgttttacatcaaagccacccgcattgggaaatgattatcgcggatgattgttccacggacggaacgagagatattttacggcaatatgaacaaaaggatgagcggatccgcgtcgtttatttagatcaaaacgggggagccgcggctgccagaaatacagcccttaaacatgcccagggccgttatgtcgcatttctggacagcgatgacagatggaaaaaggaaaagcttcaaaaacagcttgcgtttatggcagagcggtcctgcgctttttcatttacgggctacagcgtcatggagcaggacggaacgccgacggacaaaacgattcaagcccctgaaagcctgtcatatgatgaagctttaaaaaacacgattatcggatgtttaacggtcatgattgacagagagcagacggggcagattcaaatgcctgatatcagaacgcggcaggatttagcgacatggctttccctgctgaaaaggggatttacggcttacggcctgaatgagtgcctttcagaatacaggcttgtgcagaattcgatttcaagcaacaagtggaaagccgcaaaaaaaacgtggtttgtttatagagaaattgagcgcctgcactttatcaaggcttcgtggtgttttatgcaatatgcgaaaaacgcggtcatgaaaagactgtaggcgtcagaggagctgggtgatgaaggtggaaccgattattcacgtaatcgtcggagcggcggaatgggggcatgaccggctgagatacagacggcaccggctggctgaatttctcgcccggcaaaaagaaacgaaaagcgtcatttgggtatgcccgtctccgcgagccaatgatggtcagatggccgggatcgctgagggaatccggcagttcactgtaaaggatctcatgcagcaaaaagctttccgcttcggcaggtatacagacatgtgctacaggcataagctttcaccattggtgaacatgctgaaggaagaaggagaaggggcccgctgctgcttatggtacaccttccccggttttccgcttctggcagatctgtttccttgggatgaagtgatttatgattgcagtgatctgtgggccgctccgatcagcggccggtccggggtgctgtcaaatgttagaagaaacatcattaaacaggcggaattgagaatcattcagcgtgccgattccattacgtgtacatctgactgtctgcaccaggaggtcggaaaaaagctggagaacccgcaccagaaagtgttcaccattgaaaacggagtggaatatgaccttttttcacgggaaaataaacagccggatgaagacattttacggggacggaacggaacggttctcggttttatcggcggaatcaaaccgaagctcgattttgcgcttatggcggaagcggcagagttgaggcctgactggacgattttattggtaggcccgaatacggctcaggacgatccggatttcaagtcgcttctggagcgtccgaatgtcatctggacgggacctgccgcgccgaatgaagtgccgtcctatatgcagcttgtcgacattggcatcatgccgtataaaaattcaccttataatgacgcggtatttccgcttaagctttttgaatttttagccgccgggaaaccggttgtcggctgcaacctttcttctacgtcaaaaatcaaaaggcctttcgtttatgaatacgttgaaggcagtgaccctgcagatttcatcgcggcgtgcgacgcgcttctggcagcggaccgcagcggatcatacgaggctttgcgccgtgaattggcccggagacgggattggaatgttttattcggccgaatgctcgaatacacgggtatattgaaaaatgcgcaatcccattaaaagggaaagcgcattttttgatttgcgtgtttctttttgatgatgcttgttataataactagtaagaattataatggaaggaacggttcaatatcagaaaagacttcatataattccaaaggagacttctttatgcttgacgaacgcatgtttcgcatagttgttgcgttttttgtctctctgctaacggttttaatcctaactcctatcgtaaaaaaaattgcgatcaaaataggtgcagttgaccagcccagcaaccgaaaagtacatgataaaataatgccccgtatgggcggcttggccatctttatcggcgtagcggcgggtgtgctcgcggccggcatatataatgaaacgaaaatgaccgccattacagtgggtgcgtttattattgttattttaggaatccttgatgataaataccaattaagcgcaaaggtaaagtttttcgtccagctggccgtggccattatgattgtgagcacgggactgaaaatggactttttctccgtaccgtttttaacggaacgtttagaattgggatgggtcgcttacccgctgactgtgttatggatcgtcggtattacgaacgcgatgaacctgattgacggtttggacggactcgctgccggcctgtcggtcatcggactctccactatcgccgttatggcgttgtccggagggaaaatccttattctgtcactttcacttgtcgtgataggaagcacactcggatttttattttataattttcacccggcaaagatatttatgggagataccggatcgctctttctcggatacgtcatctcagtactctcattattgggtctttataaaagtgttactttattcagtatcatcattccgatcatcattttgggcgtgccgatttttgatacgacattcgccgtcatcaggcggattttaaacaaacagccgatctcagcgcctgataagtcacatatacaccaccggctgatggccttcgggctgtcacaccgcacggctgtcattatcatttatttaatcggctttattttcagcgtcagtgccatcctgctgaaaagcgcgaccatatggctttcgctgtttattatttttgtattgattgtatttatgcaaatcatagcagaggtcacagggttagtaaatgaacaatttaaaccatttaccaagttttacaagagattggtaaagaaaaattaaaaagagcagatcatgcgaatggtctgcttttttgtggattctgctattctcttattatataaaaaaacccgatcctgctcaaaggatcgggtttactcttaatagcctgttgtgccgccggactgtgtgctgtccgtaccgtttgcaccagcagtaccgttggttgaatcggttgtaccgcttgttcccgtgctgccggaagtcgaatcagtcgtgccgtctgttcccgtgctgccggaagtcgaatcagtcgtactgtccgttcctgtgctgcttccggacgggtaatccagatgtttctgcaattcctgccgtactttttcgagattggtcggatcgggctggaaataatatgttccgcctgtagacgcggttccgccgccgcctaaatatagatctgatcctgttatgctcagtgtatcaatctttttgctggtaaagccgctgtaaatctgctgaagggcaagtccttcagtgattcggatattcgtttggacgttattgcttgctgtttcagcgattttatcgattttagcaatatttccagccttagacatttggtcgatcagtgcatttaggatttgcttttggcggtcattccggccgaagtctccgcgcttatcctgctttctcatccgcgcgtaagccagagcctgctcaccgttcaaatgcatgtttcctttcttgaagtagatccgtttctttttactgacgtcactcatttcgtcgaagtcaaacggcacttttacattgactccgccgacttcatcaataacatccttaaagccattaaaatcgacagtgacatacttatcaatcggtatgcctaataagtcttcgacggttgagacggtttcatccgccccgcctttagcaaaagccgcattgatttttgattttttaccggttgtatcgccggcaagcgtcacccgcgtatcacgcggaatactcagcattttcattgttttatttctcggatcaagggtaacgacaataagagagtctgatcgtccgccttttccgcttgtggcataattttcgatccccataaacaaaatggagaacggttttttcttcatatcgatgactttatcccgaagttttgatttgtctccgcgggaaagggcatcatacgcattatctgccgcattgatcgttttgtatactttgtatccgccaaacccggcagcgactaacaaaacgagggtaagcagcagcaaaatccgtttgaatatgatctttcgtttgcttttctttttctttcgaacacgcactcttacacgttcagccattacattagtctcctttagggctgacgtctgtttctaaatacgtcagttctccctctgtattcttactcttgccgttcgtcagttctgtcatccattttataaactcgtctttgtctttttcttcaacgtacgtttcaaattcgacatgatccgcataatggatatctttcagtaaaaaaactgattctctcagttcgttctctatcttgccgagccacgtataatccgctgatgtatgcataatccgcatcagcttccgctccgtaactcctatatgatttaagccttcagacactgacttcccatatgcacgaatcaatccgcctgcaccgagctttattccgccgaaataccgggtaaccaccgcgcaggtatctttcagaccgcgttttttcagcacttccagcatggggacgccggctgtgccgcttggttctccgtcatcattcgccttttgtatatggtcggtttcgccgatcagataagctgagcagttatgagtcgcattccagtgctgtttttttatcttttgtataaattcctgcgcttcctcttcagaagcagcacggctcaggtgacagataaaacgcgatttttcaatcacaatctcatgttcacccgtttctttaactgttaaatagctgtgcagcatgattgctggaccctcctgacaagcattaaaagacttgtttctacaaattcgaacagactttagaatttttgcgcatattttggtatcatgaaagagtaagatactatataaaaatgtttttttctagaatatacgcattctttcattataattcgacataaattgcagttcaattacatttataataaaaatacataacaacaccgttacggagggagacagatgaataaatcgaagatggactccaaagttttggattctatacttatgaaaatgctgaaaaccgtggacgggagcaaggacgaggtttttcaaatcggagagcagtcgcgccagcaatatgagcagctggttgaagaactcaaacagatcaaacagcaggtgtacgaagtcattgagctgggcgacaaacttgaagttcatacgcggcacgcacgaaaccgcttgtctgaagtaagcagaaatttccataagttcagcgaagaagaaattcgcaacgcctatgaaaaggcgcacaaacttcaagtggaactgacgatgatccagcagcgtgaaaagcagctgcgggagcgcagagatgatttagaacgccggcttttggggcttcaggaaatcattgaacggtcagaatcattagtcagccaaataaccgtcgttctgaattacctgaatcaagaccttcgccaagtagggcttcttcttgccgatgcgcaggctaaacaagatttcggtttaagaatcattgaagcccaagaggaagaaagaaaaagagtttccagagaaattcatgacggtcccgcgcaaatgctggcaaatgtcatgatgagatcggaattaattgaacggatcttccgcgaccgcggcacggaggacggatttcaggaaatcagaaatctacggcagaatgtgcggaatgccctttacgaagtcagaaggattatatatgatttaagaccgatggcattggacgacctcgggctgattccgacactgagaaaatatctttatacaactgaagaatacaacggaaaggtgaaaatacattttcagtgcatcggagacacggagaaccaaaggcttgccccgcaatttgaagtggcgcttttccgtctcgctcaggaagccgtcacaaatgcactcaagcattcagaatcagaggaaattacagtaaaagtggaagtaaccgctgattttgtcgttctcatcattaaggacaatggaaaaggctttgatattaaggatgctaaacaaaagaaaaacaagtcattcggcttgctgggaatgaaagaaagagtagatctgcttgaaggaacgataacgatagactctaaaataggtcttgggacatttatcatgattaaggttccgttatctctcggcctataatttgttaaatagagccaaaagacatattgaccgaacagcggcgtatatagaacaataggataaggaggcgtagcgtgtgactaaagtaaatattgttattatcgacgaccatcaactattccgtgagggtgtaaaaagaatattggattttgaacctacctttgaagtggtagcagaaggtgacgatggagatgaggcggctcgaatcgtcgagcattatcatcccgatgttgtcataatggacattaatatgccgaatgtaaatggtgtagaggctactaaacagcttgtagagctgtaccctgaatctaaggtaattatcctctccatccatgatgatgaaaactatgtgactcatgctttaaaaacaggtgcaagaggctatctcctgaaagagatggacgcagatactttaatcgaagcagtgaaagtggtagccgagggcggttcttaccttcacccgaaagtaacccacaatcttgtcaacgaattccgccgtcttgcgacaagcggagtttctgctcatcctcagcatgaggtttacccggaaatccggagaccattacatatattaacgagacgggaatgtgaagtgctgcaaatgcttgcagacggaaaaagcaaccgcggaatcggtgaatcattgtttatcagtgagaaaacagtgaaaaatcacgtgagtaatattttgcagaaaatgaacgttaatgaccggacacaagccgttgtcgtggccattaaaaacggctgggtagagatgcgttagtcatgtgtgagaagacttgcctgttatggcaagtctttttttacagctgcatatctattaaaatacttattaagtacttaataaggcaggtaaagtgatgaagattgcagttgtaacagacagtacagcatatattccgaaagagatgagagaagaacatcatattcatatgatccctctccaagtggttttcggtgaaaaaacattccgcgaagaaacagaactcgactggagaagtttttataaagaagtaaaaaatcatgatgagctgccgactacgtctcagccttctttcggtgaattaatcgcattgtacgaagaactgagcaaaacatatgatgcagtcataagcatacatttgtccagcggaatcagcggaacatataacagcgccgcctcggcaaacactatggttaatcatattaaagtttatccctttgattcagagatcagctgtttggcacaaggtttttatgcattaaaggcagcacagctcattaaagacggtgttgactcaccggaaaagattataaaagagctggaagaaatgaaaaaaacagtccgtgcgtattttatggtggacgatttatcacacctccagcggggcgggcgtctaagcagtgctcaggcttttatcggcggtctgttaaaggtaaagcctattcttcattttgacaataaggtaattgttccttttgagaagattcggacacgcaaaaaagcgatttcgagaatttttgagctgtttggggaagatgcaagtaaaggaatcccgatgcgggccgctgtcatccatgcaaacagggaacaagaagcggcggatattatacaggagttaagcggtaagtatcctcatgtcgaattctataacagctatttcggcgccgtgattggaacccatttgggcgaaggtgccatcggaatcggctggtgctttaaaaactaagtgaaaatctccgttttcaagggcggagatttttttattttttaattttggcaattcgacaagtaggttcccgacaaggcatactttgagcagaaaggaggcagggagatgtccggaggtgcttcggaattttcagaggtgcgggatttcttttacggccggcatttattgagatctgagataccgttttcagatcagcgcatcaacggttttatagaaaaagagtatataacggccgagccgtcaatcatccgccggaaaaaccgttacgtctgccaacgatgcggtcagtctgatcaagcctgctttgcggcatttggggcgccctctgccaaaaggcagattacctattgccgtgcctgtgtcatgatgggaagggctgatgaactgacatcattatattcttggaatcaagcctctgaaaacagctgggagcctgtaaagctttcttgggaaggaacactgacagacggacagaagcaggcggccgccgcgcttacagatgcgataaaagagagacaagagctgttagtatgggcggtttgcggatcggggaaaacagagatgctgtttccgggtatcgagtttgcgctgaatcacggtttgcgcgtctgtgtcgcgactccgcgtacagatgtcgtacttgaactgctgccgagactgaaaaaagcatttgagaaagtcgaagtttctgctttgtacggcggcagcgaggacaaaggccgtctgactccgctgatgatttcaaccgctcaccagctgatgcgctaccgagacatttttgatgtcatgataatagatgaagtagatgcgtttcctttttcagccgatgagacattaagattcgctgttgataaagcgaggaagaaaaacagcgcccttgtttatgtaacggcaactccttcagacacattaaaaaagaaggctgaagccggtttgctgaaaagcgtccgcatcccggtcagatatcatcggaaacccctcccggagccgcgttttttgtggtgcggcaattggaagaagaagcttcagaaaggaaaactgccgcgctctgtaacggattgggtttgccaaaaacttcaatcacagctgcctgttttcttattcgttccgtctgtacacgtattgaaaaagacaacggattattttcagaaattaaacatacgggcagaaggcgtacatgcggaagacacattcagaaaggataaagtgaaacggttcagagacggccggcttgacctgctggtaacgactacgattttagaaagaggggttaccgtgcccaaagttcagacatgtgtcctcggcgcagaagcacctatctttactgagagcgcgctcgtacagatcgcaggcagaacgggaaggcattataaacatttcagcggtgatgtcgtcatgtttcatttcggaattacaaacggaatgaaaaaagcaaaaaaacatattgaacatatgaacaaattggcacaaaaaagtaaattgttggactagttaatttcagaaaacgtgatacagtatactcatactttcctatgaggagctgtcagcatgcttgtcaattctaaagaaatcatattaaaggaacttctcgaccgccatatgcctaagcttcatatgaaatgcacatgccgggtatgcaaaaatgatgtactggcactttcactaaaccgggctgaaccggcatatgttacagataaaaagaaagttgcttatgcaaaagcagagatagttgataaacagaaaaatacggcgctgcttgtcattctggctgaatcagcggcgattgtttcggttaatccaagcgagttctgtgaaactcgggaaggagcgtaatatctctgaattgtttattgtgtgactcaccaatttcaagttcattgacttggagatctctgttttctctggcgcccgagcaagaggtatgcagcatatgcagcagccaattcgaaaaaattgaaggccccgtatgcagtatatgcgggaggcctcaggagtcaaatgaaaaatgcgctgattgtgcggcccgggaatcaaaaacggaaaagcgctttttgctgcggcaaaaccgttcggtatatttgtataatgatgcgatgaaggactcattggcccggtttaaattcaggggtgatgcgaaaatcattcaagcatttgaacgtgactttgctgccggctttaaagcggcatatccatcaaatacacatactctcatccctattccgctgagcggcgaacggctggcggaacgcggattcaatcaatccgagctgctggcctctctgctcggaatgcccgtcatttcccccctcatccgactgaacaacgaaaaacaatccaaaaagagcaaaacagacaggctgtccgcagaaaaaaagttttcagcagccgaaaactccgccgaaggtatgaacgtcatcttaatagacgatatttatacgacgggcgccacactgcatcaagccgccgaagtcctgctgacagcgggtaaagcgtcatcggtctcctcttttactttaatcaggagctaaatcattctttttttctgccgatataattgatagaaatataaggcagattaaaagaaggaataggagttaatacgatgggtgaattggcgaattgtccaaaatgcaatgctttattttttaaaacgaacctgcagaccgtgtgccaggcatgtattaaagaagaagaaaaagcatttgaaaccgtctataaatttttgagaaagcagatcaacagacagtcgacgatgcagcagatcactgaggaaacaggtgtggatgaagagctgatcctcaagtttatcaaacaaaaaaggattcagatcagccagcttccaaatttggcatatccttgcgaaaggtgcggaaatccaatcaggacggggaaattttgcaagtcttgtcagacagatattgagtcgcaattagaccatatgaaccaaaaaacagccgctgaattcgaagagaaaaacagtacaaaagacacatactatgcctataataccaaaaacacctgattccctaaactaactgataacgcagtcgataaaagaattagactgcgaacagaaagcgagaggaatcctatgaaaatcaatcagtacggaacacaatccgttaatccataccaaaaaaattacgaaaagcaagccgtacaaaaagaggctgcaaagccgaaggacaaagtggaaatttcttctcatgcaaaagagcttcaaaatgcgtcagatgcggtcactaaaacacgtcaggaaaaaatcgctcagcttaaagcggatatagagagcggaacatataaaatagattcaaacagcatcgctgaaaacatagtgaatttctataaaaagcagtaaaaaggagaaagtcaatgtcagcaaagccaattattgatcaactgaagcgactttgcgcactgcatgaacatctgctcacgctgtctgaagagaaaacggaagcgctgaaagcaggtaaaacaaaagagctctccaacatattgaccaaagagcaaaagtatattcaggcaatcgggcagactgaggaagaacgaatcaggttaacttctcagtttctcagccgcggtgaggacaatacaattgctgcatgcatctccagaacttcaggcagtgaaaaacaagagcttgaagggttatttcactctttgtctgcgcttcttgaccgtctgaaagaagtgaatgagatgaacaaacagctcacgattcaggctttacaattcatctccggggcattcgatatgatcatgccgggtgaaaaagagaatatgaattataaagagccgcaagcggcgcgcaagcctgtcagccgtttgacattattcgattcaaaagcttagaacggaggatttttaatgccatcgacttttatggggctcgaaacagcaaggcgtgcattgagtgcgcagcagactgcattgagcacagtttcaaataacgttgcaaatgcaaatacagaaggatatacgaggcagcgcgtcacattacaatcgacgagcccttatcccgcagtatcaaaaaacagtgatctgacggccgggcaaatcggaacaggagtaaaagccggttcagttgagcgcgtcagagacagttttttagactatcagtacagaactgaaaatacaaaattagggtactatacagcccgttccaattcactgtcgcaaatggaaggcgtcatgaaagagcttgacgataatggattaaacggatcgctcagttcgttttggaatgcccttcaggatctggcgacgaatccggaaaatacgggagcgcgctcagttttgcaggagcaggggaaatctcttgccgaaagttttaactatatatctacctctttgactaacattcagggtgatattaaaaagaacctggataacacagcggatcaggtcaattccattctcaatcagttgaatgaccttaacaatcaaattgcggcagttgagccgagcggtatgctccctaatgatttgtatgaccaaagagacagattgattgatcaattatcttctatggcaaatattaaagtttcatataataagtcgggcggacatgccttggcgactgctgagggcacggttaacgtcgaattgctgaacggaaacaacaattctctcggtacgctgctcgacggtaacacaaaaacagtttcagaaatgaaaataaactacgacaaggacagcggccttgtgtcgagtgtgtcagtcggcagcagtacggtcaatgcggatgcatttaccggaaaaggctcacttttaggtcttattgaatcatacggctatatgtcaaacggagaagaaaaaggtctttatcctgaaatgctgaccgctcttgacaatatggcgctatcctttgctgacgcgtttaatgcagttcatgaaaaagggaagacctatacaggtgaacagggcgcagcattttttgatttcagcggtggtgaagcggtgccggcaaaaggtgcggcagcgaaaataaaagtcagtgacaaaattcttgcgtctactgataatatcgcagcgtcgttaaacggagaaaaaagtgacggcacaaacgcgacaaatcttgcagctgtacagaacagcaagctgactattaacggtgaaaccactacaattaatgacttttatgaatcccttatcggaaagctgggcgttaattcacaaaaagcggccaatcttatgaacaactctgaaagcaacaccctttcagccgatgaacggagacaatcaatcagtgcagtgtctttagatgaagaaatgacaaatatgattcagtttcagcacgcttataatgcggctgcgcggattataacgatgcaagatgaaatattcgataaaattattaacggtatgggcaccgggggaagataggagataagtaaatgagagtaactcaagggatgatcgcaaaaaattctcttcgatttatcggctcaagttatgacaagctcgatcggcttcagcagcaagtgtctacggggaaaaaaatcacaaaagcttctgatgatccggtcgttgcaatgaagggaatgcagtaccgtactcagcttgcgcaggtaaaccagtatcagcggaatgtttcgcaaggctttacatggctggaaaactcggaatcaagcgtaaactcggaaacggatattatggggaaaatccgggacttgatggttcaggcgaaaagtgattcgaacggtgaaacagaattgaaagcaatcggtacagaaatcggccagctgaaaaagcagctcgtttctgtcgcgaatactcaggtaaacggacgttatctgtttaacggaacaaattcagacgtcccgccgatcactgaaaatgccgacggcacatatacgtacaactatgagaattatacaggtgcttcggatgttaacatcaacatctcgaacggagcagtgctgaaagtgaattctgatccaaactcagctttcggaggcgtcgcacaaaatggagataatgtttttgaatttctaaactccctagaagcttctttaagtaaaggcacgctgtccgaagcagattcagatcaaattctgtcagatattgacggttttactgataaaatgaatgctgaaaaatccaatatcggcgcacgcacaaaccggttggaactcattcagacaagattggaatcacaagcggcaaccgctgaaaaagtattgtccgataatgaagatgtagaaatggaagatgtaattgttgattatttatctcagcagacggttcatagagcagcgctgtcagtgaatgcgaatatcattcagccgtcactgattgacttcctgaaataatataactgaccgtcttcaatatataaaaaagcgactcacaccagggagatcgctttttttactaaaatactataaacaggagggatctctgtgcagatgccgagattgattattgacagtgtgcctgctaaaatcggtataacctttcaaaaggaagaaatcgagatggaacagccgcccgctgacttggaaatcgagcagccgccggcagagctaaacattgaaagtacgccggtcaaactgacaattgatcagacgagggcttgggagaacttgaatctcaaatcatttgaaaagctgaacgctgaagccgcccagaaaggtgcggaagcctgcagcgagtttattgcaaaaacagtcagggaagggaaggaaatggcggctatcgaaaagaaaacaggcaatgtgatggcccggcaggcagcagatgtcagaccgcccgatccattcggcgaattcagcgactttctgcctgcgcagtttctcgtcgacattgactgcattccttcaaagcttacgattgatattgaagcccgcaaaccttcaattgaagcagccgtcaataaacctgtatggaattatacgccggggaaagttcagattgatatgatgcaagaccctaaggtgacgatttcggttgacgatggcaacgcagaataaaagatgaaagtggtaaaggattgtgaagcatgataattaaaacaaaatatcacggagaaatcagaatagacgaagggcagattatctcatttgaaaacggcctgccgggatttaatgacgagactcaatttgttgttcttcctttgtcggaagattcaccgtttttggcgctgcagtctgtgaaacaggagcacatcgcctttattgtcgccagtccgtttattttctttaaagggtacgaatttgacattgaccatgcgacgcttgaacttttgcatattgaagatatagaggacgtcgaagtgatggcgattttaacgctggaagagccttttgaaaacacgaccgccaatttaaaagcgccgattatcgtcaataaaaaggaaatgaaggcgaaacaaatcattttacatgatgcttcctatgaaacaaaacatctgataggaggaggatcatgctagttctctcaagaaaagtgaatgagtccattcagatcgggccggatattgaaataaaggtgatcgccatcgaaggagaacaagtgaagctgggaattgaagcgcctcagcacgtagatattcacaggaaagaaatctacttgtcgatcctggaagagaacaacagagctgtatcttttaatactgatttattacttaacttatcctcacaaaaaaagtgaggatttttttattttcaatataaacaatggaagcggccgtccgatatatatattgtagccaatgagaggaaaaattttcttcagaatgacgctgcgcaaatgcacaaggacgtgcgaaaaacaattcagggaggaaatacaaaatgagaatcaaccacaatatcgcggctcttaacactagccgtcagctgaatgcaggttcaaactctgctgcaaaaaacatggaaaaattatcttcaggtcttcgcatcaaccgcgctggtgatgacgctgcgggtcttgcgatctctgaaaaaatgcgttcccaaatccgcggtttagacatggcgtctaaaaacgctcaagacggaatctctcttatccaaacggctgagggtgcattaaacgaaactcacagcattcttcagcgtatgagcgagcttgctacacaagcggctaacgacacgaacactacttctgaccgtgctgagttacaaaaagaaatggatcagctttcttctgaagtaactagaatttctacagatacagaattcaacacaaagaaactacttgatggcacagcaactgacctgactttccaaatcggtgctaatgaaggtcaaactatgaagctttcaattaataaaatggattctgaaagtcttgctgttggggatgctactaaaggaattgatatctctacttctgcggaggcagcatctactgctcttacaacaatcaaaacagctatcgacacagtatctagcgagcgcgctaaacttggtgcggttcaaaaccgtttagagcacacaatcaacaaccttggtacttcttctgagaacctgacttctgctgaatcacgtatccgtgacgtagacatggcttctgagatgatggagtacacgaaaaacaacatccttactcaggcttctcaagctatgcttgcgcaagctaaccaacagcctcagcaagttcttcaattgctgaaaggttaatgacggaaagatcctggttctccagggtcttttttttatttcttcagctatctcccccttcagcaagccaaagaaccctattgacaaaatgaaacattatattttgcagttaaattattgaaaaccttttaatatgaccgatataagaataagatcatacatttatggagctgtgatatgataaacagtcggaaactcactgttgtcatagagccgtctacgactaaacgccgaaaaggagagggtacatatggtcacaagaatcacaggccttaattccggtcttgatgtagattctctggtgaaaaaaatgatggatgccgaaaagcagccgcttaataaattaaaccagcaaaagcagacgcttgaatggaagcgcgatgcttatcgggaagtgaatactcagattgccgacatgtattctacgacatttaataatatgctgatgtccacaaactggaataaaaaaacagtaacaagttcggattccagtgtcagcgcggcggccgtcagtgctgagcagaatatttcaacgagtatgtctgtacagcagctggctacgccgacgacttataaatcatcaggcgccatcaatttcacttcgggtcagagccaaacattgaaattcaatgtcacaaatccgggtgaaacgaagccgactgaggtaaacgtcacgatcgccgcaaccgatacgattgacgatgtcatttccaaactgaacagctcgggtctcggagtgacggctttaaaagagaaaatttccaacggcacggattatgtggatacgattgcgttcacttccaataaaacgggggaaggatttacccttgccgcaggtgatgacgcaaccaaaagctttctgaaagatcagctcggttttgccgttgatgatgcaacaaatgaactgacggccaatgccgaagggaaaaacgcgaagtttacgttcaacgggcttgaaatgacaaaaacgtcaaataactttacgatcaacggcatcaaatacacgctgaacagcgtgacggacagcaataaaacggttacgattaacagcacgactgatacggacggcatttttgacaacattaaagatttcgttgataaatacaatacgttaattaaaagtgcaaacgagaaggtaacagaatcaaaataccgcgattataagccgctaactgatgaacaaagagaagcgatgaccgataagcagattgagcagtgggaggcaaaggccaaaagcgggttattacggagcgacagcacgctgcagaacggtttggcggagatgcggattgatctgtactcaacggttacgattgacggaaaaaaatatcagcttgccgatttcggtatagagacgtctagttatgaggatcaaggaaagtttggaaagcttgtcattaaagacgaagcgaaactgaaacagaaaattaccgagaacccctctctcgtggctaagctgtttaatgcagacagtacaagtacgattacagacagctcaaccggtaagactatcaaaaacccggaggagcaggggattgcccggagattaaaagacacattaaacaaaatgcagactcaaatttcaaaacaggcgggtacggaaagctcggtatcatccagctttgccatcggaaaaagcctgaatgaaatagaaacaaatatttccaatatgaaaacgaagctggatgacatcgaatcgagatattataaaaagttcagcgcactggatacggcattggagaaattgaacagccaatcttcatatctcacgtcaatgttaggatcttcaacatcataaccttggaggttttataaaaatggcaataaataatccttttgctgcttatcagcagacatccgtctttacagccgctccggaagagctgactcttatgctttataacggctgcctgcgattcattaagctggcaaggcaggcgatgaagcaaaacaaccttgaagccaaaaatgaaaatatcgtaaaggcgcaaaacatcattcaagagctcagcatcacgttaaaccgggagattgagatttccgagcagatgtcatccatttatgattacatccgccgccggctgatcgatgcgaacgtgcagaataacggagagtttttagatgaagcggaaaagctcgttactgaatttcgcgacacgtggaagcaggccatgcagagtgaacggaaaaacagccacggcgcgggcggccttgcctgatgaacagcaatgtcttttctttgtataacgaaacgaagaacatgtacgccgcactgaaggacgccccggaaagcgatggtcttatcagcagcgttacggcatttacggagaaaagggaggagatgcttgcgggcataaagccgcctttttccgaagaagaaaaaacgctgcttcagcaggtggccgcgatggaccgtctgattaccggcgaagtgaaacggattcaggatggtatccgaaataaaataaaaacgcttaagaaaaaacgaatctaccataatacgtatttcaatccgtatcatcaaacgacaagtgacggccgttattacgacaaacgcaaataggtgagtgttttgagaagtttgaatgattaccatttggtgtcagcctattaccagcttctttttacgattgatgaggggctttgctacctgttggacacgcaggatgatttttttaagacggagggcgagcggatttacaacgatttgattcaggctttttttcatctcgattcctctcatgcgcttctgctgtctatcattgagtgccgatgcgtggagacggcgatccgctcatttgacgagatctttcaggatttcagcatgttaaatgattatgatttcccgtccgctccttttcaggagtttttaaaaaccatctttctgccgcattataagctatggatggagcagacgcacgactgcatcaaaccgtatgttcttcactagacctgctgcaagcggcaggtcttttgcctgcgtcttccgcatatacttataatcctgccggaagctgcgggataaaaccgacaccattcgtcatcgttcaccgaatttacacattattttaacgtttcagcagggatcagaaggggtaaaagagaaatagttacatatccttagataaagggaggcgttctttgatgaactacaatatcagaggagaaaacattgaggttacacctgcgttaaaggatcatgtggagagaaaaatcggcaagctggaacgatatttcgagcagagcgtcaatgccgatgtgaacgtcaacttaaaattctataacgataaggaatctaaagttgaagtcaccattccgatgactgatctggcgcttcgttccgaagtgcataacgaggatatgtacaatgcaattgatctcgcaacaaacaagctggaacgtcaaatccgaaagcacaaaacaaaagtcaaccgaaaattccgcgaccagggtcttccgaaacattatttcgagaacggcagcgctgctgatacgggcgtagcggttcaggacgaaattgaagatgacagcccggaaatcgtccgtcaaaagcgttttaatttaaaaccgatggataatgaagaagcgattctccaaatgaatatgctcggacataatttcttcgtattcaccaacgcggagacgaatctcacaaacgtcgtttaccgcagaaatgacggcaaatacggattaattgaaccgactgaataaacccatccagccttccgtgaacgcgcggaaggtttttctctatctttacctgcaaattctttggaaatagcaaaaggtatgttatgataatgagaggtatacatggacagaaaattatcatttattccatgcaaaatctgcatgtgaacatagaggagcgttatagatgcttgggattttaaataaaatgtttgatccgaccaaacgtgcgctgaacaaatacgaaaaaatagcaaatgacattgatgccgtaagaggagattatgaaaatctctctgacgaggcgcttaaacataaaacggcagaatttaaagagcggcttgaaaaaggagaaacgacggatgaccttcttgtcgaagcgtttgccgtcgttcgtgaagcttcccgccgcgtaaccggcatgttcccgtttaaagtgcagctgatggggggcatcgcccttcatgaggggaacatctccgaaatgaaaacaggggaagggaaaacgctgacgtccacgcttcccgtgtatttaaatgcgctgacgggaaaaggcgttcacgtcgtaacggtcaacgaatatctggcgagccgtgatgcccagcaaatgggagaaatttttgcgtttctcgggcttacagtcggcctgaacctgaattcgatgtcaaaagacgaaaaacgcgaagcttacgcagccgatatcacatattcaacgaacaatgaactcggctttgattatttgcgcgacaacatggtgctctataaagaacaaatggtgcagcgcccgcttcattttgccgttattgatgaagtcgattcaattttagtcgatgaagcgagaacgccattgattatttccggacaagctcagaagtccacaaaactgtacgtgcaggcaaatgcgtttgtacgcacactcaagcaagatcaggattatacgtatgacgtcaaaacgaagggcgttcagctgacggaagaaggaatgacgaaggctgaaaaaacgttcggcatcgacaacctgtttgatgtcaaaaacgtggccttaaaccaccatatcaaccaggccttaaaagcccatgcggcgatgcagaaagacgtggattatgtggttgaggacggccaggtcgtcatcgttgattccttcaccggccgtctgatgaaaggacgccgctacagcgaaggtcttcaccaggcgattgaggcgaaagaaggcctggagattcaaaatgaaagcatgacattggcgacgattacgttccaaaactatttccgtatgtacgaaaagctggccggtatgaccggtaccgcaaaaacggaagaggaagaattccgaaatatttataacatgcaggttgtatccatcccgaccaaccagccggtcatccgtgatgaccgtccggacttgatctaccgctcaatggaagggaaattcaaggcggtggcggaggatgtcgcccagcgctacatgaccggacagccggttcttgtcggtacggttgccgttgaaacgtctgaattgatttctaaacttctgaaaaacaaagggattccgcatcaggtgctgaatgccaaaaaccatgaacgtgaagctcagattattgaagaagcgggacaaaaaggcgctgtcacgattgcgaccaacatggcgggacgcggaaccgacattaaactcggcgaaggcgtaaaagagcttggcggccttgcagtcgtcggtacggaacgccacgaatcccgccggattgacaatcagctccgcggacgttcaggacgtcagggagacccgggcatcacacaattttatctttcaatggaagatgaattgatgcgccgtttcggagctgaacggacgatggcgatgcttgaccggttcggtatggatgactccacgccgattcagagcaaaatggtgtcacgcgccgtggaatcatctcaaaaacgtgtcgaaggaaacaactttgattcacgtaaacagcttcttcaatatgacgacgtgctccgtcagcagcgcgaagtcatttacaagcagcgttttgaagtcattggctctgaaaacctgcgtgacattgtggaaggcatgatcaagtcttctctggagcgtgcgattgccgcttatacgccgaaagaggagcttccggaagaatggaatcttgacggcctcgtggagctggtgaattcaacatatcttgatgaaggcgcgcttgaaaagagcgatatcttcggaaaagaaccggatgaaatgcatgagatgatcatggatcgcatcatgacaaaatataatgaaaaagaagagaatttcggtacagagcagatgcgtgaatttgaaaaagtcatcgtattgcgtgccgttgattcaaaatggatggatcatattgatgcgatggatcagctgcgtcaagggattcacctccgcgcttatgcgcagacaaatccgctgcgtgaatatcagatggaaggtttcgcaatgtttgagcacatgattgagtccattgaggacgaagttgcgaaattcgtcatgaaggccgagattgaaagcaatctggaacgcgaagaagttgttcagggccaaacgacggctcatcagccgcaggacggcgatgaggccaaacaagcgaaaaaagcgccggtgcgaaaagtcgtagatatcggacgcaacgcgccttgccattgcggcagcggaaaaaaatataaaaattgctgcggccggacagaatagtctcgactgtatgaagcgaacatgaccgggtctgcgtcttatggcgccccggatcttttaatgaggtgaatggaatggaattatcagaaatcagggcagagctcgaaaatatggcttctcgtttagcggacttcagggggtctctttgacctcgaatcaaaggaagcccgcattgcagaattagatgaaaagatggcggaaccggaattctggaatgaccagcagaaggcccaaaccgtcattaacgaagcgaacggtctgaaagaatacgtgaactcctatcatcagctgagcgagtctcacgaagagctgcaaatgacacatgatcttttaaaagaagaacctgaccaggaccttcagcaagagctcgagaaagagctgaagtcattaacgaaggaattgaatgaatttgagcttcagctgcttctcagtgaaccatatgacaaaaataacgcgattttagaacttcacccgggcgccggcggtacggaatctcaggattggggttccatgctgctcagaatgtatacccgctgggcggaaagacgcggtttcaaagttgaaacgcttgattatctcccgggagatgaagcaggaattaagtctgtcacactgcttattaaaggccacaatgcatacggctatttaaaagcggaaaaaggcgtacaccgtcttgtgcggatttctccatttgattcatcaggccgccgccacacgtcattcgtgtcatgtgaagtcatgcctgaattcaatgaagaaatcgacattgatattcgtaccgaagatattaaagttgatacgtaccgggcgagcggtgccggcggacagcacgtcaatacgactgattcagccgttcggatcacccacctgccgacaaatgtagtcgtcacgtgccagacggaacgttcacaaatcaaaaaccgcgaccgggcgatgaaaatgctcaaagcgaagctgtatcagcgcagaattgaagaacagcaggcggagcttgacgaaatccgcggcgaacagaaagaaatcggctggggcagccaaatccgctcgtacgttttccatccgtactccatggtgaaagatcaccgcaccaatacggaaatggggaacgtgcaggcggttatggacggagatatcgatatcttcattgacgcctatttacgttctaaactgtcgtaatccgggaacacacctgcctttggcaaggtgtgtttttttatccgttctctttttccatttttcacaacagcgctttagcaaattaatacggtatttgactgttatttacttctaagccgggaagacttaaaatgctatcgagagaaaatcggagaacggaggattttgcatggatgtgaatcacaataagccgctccgtctgatcaaagattatatatacatcatgatcggcgcggcgattacgggggtcgtgtttaacgtatttttgctgccgaaccgtatagcagcggggggagtaagcgggatcagcaccattttagaaacgtttggttttgaaccggcttacgtgcagtggattattaacatccctttgtttatcgccggagtgatcattctcggcgggaagttcggaatgaagacactggtcggttccatcgttctgccgctcgccgtctatttaacaagagaactgcctgccgcgacgacccatgaactgctggcggcgattttcggaggcgtcgggatcggaacgggaatcggcatcgtgtatctcggcaaaggctccacggggggaacggctctggcggggcagatcattcacaaatacacagggctttcgctgggaacgtgccttgccatcatggacggattaattgtgctgagcgcgatgctcgtattcggagtggagcagggactgtatgcgatgctcggggtatttatttcaagcaaaacgattgatgtcgtgcaggtcgggttcaaccgctccaaaatggctttaatcattacgcagcatgaagaagccgtcaggtcggctgtgtttaaagaaatcgacaggggtgtgacgaagatttccgcagtcggcgggtatacggaacatgaccggccgatcttaatgtgtgtcgtcggccagaccgaattcacaaaactgaaacaaatcgtcaaacagattgatgagtcagcctttgtcattgtcgcagacgcaagcgaggtgctcggcgagggtttcaaacgcgcgtaaacggggttataatagcgaaggggtgcatcttacatatgaaatcaaaatgggcgctgcttgcgctggttctgaccatgtccgtcctgctggcggcatgcggcggttccaatgaatcgaaaaaagaaagctctgacagctcaggcgggtcaaaagcatctgcgtcagcaggagaagagctttatcagcaaagctgtatcggctgccacggaaaagacttagaaggcggcggaggtccgaatttacaggaagtcggcgggaagtatgatgaagctaaaattgaaagcatcattaaaaacggacgcggcaatatgccgagccatcttgtaaatgataaggaagccgctgagatcgcaaaatggctgtcacagaaaaaataacagaaaaaccttgcctgttataggggcaaggttttttcacggcctgggaatgaaaagaaactgtaatagtaatatgtctaaatttgacgtataatgaagtgtactgaggaaaaggaactttcagatttttcatctgtttcctggtaaatcggccataaaccgctgtacgtttgcgaactctatggctgcaagacataaataaaagattaggtgatttcatgatagagatgaaagaagtatataaatcctatccgaacggtgtaaaagcgattaacgggctgtcagtcatgattcatcccggagaatttgtatatgtcgtaggaccgagcggagccggtaaatctacttttattaaaatgatttacagagaagaaaagccgacaaaaggacaaatattgattaatcataaagatctcgcgtctgtaaaagaaaaagagattcctttcgtgcggcgtaaaataggtgttgttttccaagatttcaaacttcttccgaaattgacggtatttgaaaacgtcgcgtttgcacttgaggttatcggagagcagcagtcagtcattaaaaaacgcgtgctcgaagtgctcgatcttgtgcagctgaagcataaagcgcggcagtttcccgaccagctttccggaggagaacagcagcgtgtttccatcgcaagatccatcgtcaacaatcctgatgtcgtgatagctgacgaaccgacgggcaaccttgatccggtaacatcatgggaagtcatgaagacgctggaagagattaacaaccgcggaacgaccgtcgtgatggcgacacacaataaagaaatagtaaacaccatgaagaaacgggtcatcgcgatcgaagacggaattattgtgcgtgatgagtcaagaggggagtatggttcttatgattaaaattctcgggcgccatttgcgtgagagttttaaatctctcggaagaaacacatggatgacatttgcatccatcagtgccgttaccgttacattgattttggtcggcgtgtttttagtcattatgctgaatttaaacaacatggctaaaaatgctgaaaaagaagtggaaattaaagtattaatcgatctgacgtctaataagaaaacgcaggatacgctgcagaatgagattaaagacatctcgggaatccagagcgtagagttttcatctaaagataaagagcttgatcaattggtcaaaagcttcggcgacagcggaaaggccatgaaaatgcaagatcaggaaaacccgctgaacaacgcgtttatcgtcaaaacgacagatccgcatgatacgccgaaagtcgcgaaaaaaattgagaagctggatcatgtgtataaagtgacatacgggaaagaagaagtcagccgtctgtttaaggtcgtcggggtgtcacgcaacatcgggatcgcgttaatcatcggccttctgttcacggcgatgttcttaatttcaaatacgattaaaatcacgattttcgccagaagaaaagagattgaaatcatgaagcttgtcggcgcgacaaactggtttatccgctggccgttcttcctggaagggctgctgctgggggtattcggttctatcataccgatcgctctcgtgctgagtacgtaccagtcgatggtcgcttgggtggccccgaaagttcagggatcatttgtttcacttctgccgtacagtccgtttgtgtttcaaatatcacttgtgctcattctgatcggcgcggttatcggagtatggggaagtctgacttccatccggaaattccttcgtgtataaatacaaaagccagtctgatatagactggctttttttaatggtttcgttactgaatgacgggcagggccggtgatccgggctttaatgtaaagtcataagacgcttcgtcacggtacatcgggtccgcataaatggaatccgaatcgtttgccgttcctttttggtacgctgtgaatgaatcatattctctgttcttccaattccaaatgccgtcttttcccgcttctttgtgatagacgttatgattaacggtattgccttcgtttttcgtataatcatttgcgataaaaatccgtgaaccgcttgccgtcatgatgtttttttcgatcgtgttcccttttgtgccgtactgcagcagcagctggccgccgtcaaggtccttcgtatcatttcgatacataatgttatgagcgatcaccgaattgatggtgccgccgcgtttcgtgtcatagcctccgattgaaataccggtgtaagcattgccgtacaccttgttatccgtaatccggatatctcgtgcgtatttccctttatgctcagaggtggcttcaatcccaaggtcattgttgtaaacggtgttattcttaatgtccacatgttctgcgccgtcaacgtaaataccgcccgctgagtattcatctccgtaagcggggtttccgtaagaagagttatggctcaccgtattgttttcaatgacgccgtttcgcgcatagtcgttttgcttggacgttccttcgtatccgatcacgtcaatcccgatattgttattgtcccggatggtattgccggcaatcttaaatccgtcaacattcccgttcagcacgaccgcttcgcttgcgccgagcgtcagtttttcaaccgtattatttgtgatgctgacatccttcatggcgcctgtgccgtaaaacgcgatgccgtgtgcatttccctcatcagccgtggttttaatgtttcggatatggttgccgtcaatgttgatatgactgctcgacccggtgacgcagatccccatggccgtcgcatcttctgatgatacggagagattctcaagcgtaacgccgtgaatggtaatgtactgtttattgcggatttgaattaacggagtttcagaatcgctttttggcgcagatttgccgctgatagcgacatgctcattctgatagttccgaaatgtaatcggcttttcggccgtgccgctgtgctttacttcaaacgtttcatcgtacgtcccttcccgaatcaatacggttgtcccgggctctgccttttcagccgcatgttttaatgtgcggaacggcttttctatcgttccttcattttggtcgctgcctgcgggagaaacatacaaggcgtccgtctgcattttttcattggtctctgtttttggccagacaaaggcggtaatgcctgcggccagaatcgccgcggataaaatcgataattttattttcatatcgcattctcctgtatatttaatgaattgcatacaaaatattatacgttacccatatatatgtaacaatctcgcgttttcatttttttgttgccgttacatgaattctttgcaatttacacatactatctccaggttttcgtaaaaggactaagaggaggtaaacgatgaagcagaaaatgatcgcagtgatagcggccgtcagcatcatgtgcggcggagctcatattgccggggcggcacagccgaattcaacagacgcagaaagaagccgggcaatggaaaaaatcgaaaaagcatatgagctgatctcgaacgaatacgtggaaaatgtagataaagaaaagcttcttgaaggagcgattcaggggatgctgtctacattaaacgacccttattccgtttatatggacaagcagaccgccaagcagttttccgattctcttgattcttctttcgaagggatcggcgctgaagtcggtatggaggacaataaaatcattatcgtatcaccgtttaagcaatctccggcggaaaaagcgggactcaagccgaatgatgaaatcatcagcataaacggtgagtcaatgaacgggaaaggtttaaacgaagccgtgctgaaaatcagaggaaaaaaaggatcgaaggtttctattaaaatacagcgtccgggtactgataaacagctgtcattccggattaaaagagcggaaatcccgcttgaaaccgtatttgcttcccgcaaagaatcaggcggtcatcatgtcggctacatcggcatatcgacattttccgagcataccgcccaggacttcgccgcggcgctgaaaaagcttgaaaaacaagggattgacggtctcgtccttgatgtaagagggaatcccggcggctaccttcaaagcgtcgaacaaattttaaagcatttcatcacaaaagacatgccgtatatccaaattgcggagcgtaacggcgataaaaaacaatatttctcaaccttaaaacataagaagccgtatcccgtcaatgtcattacggataaaggaagcgcctccgcttcagaaattcttgcgggtgcgttaaaagaagcgggacattatgacgttgtcggtgacacttctttcggtaaaggaacggttcagcaggccgtgcctatgggagacgggagcaacattaaattgacgctttacaaatggctgacaccgaaaggcaattggattcacaaaaaaggcattgctccgacaatcgccgtgagccagccggattattttgcggcgggaccgcttcagctgaaacagccgcttcagcctgatatgaacagcgcggatgtcaagcacgcccaaatcctgctgaaaggcctaggcttcgacccgggcagagcagacggctatttcagcaaaacaatgaaaaaagccgttctggcgtttcaagaccggtacaagcttgataaaacagcggtcattgataaaaagacagcggaaaaaatgaatcagctgatgaatgaacagaaatctgacgaaaaaaatgatttacagctgcaaatggcgttaaaatcattatttgtaaaataaatgaaaaggaggcgttttttacgtctcctgtttcttttgtcacaccctaaaaatgaactaaaagacatataattatgtcggttttgacaagatattaaaaaaattttcacatttaaacatttataaaggacaaacattacccgatatttatagagaagagagactttatgccgagttaatatgtattcaaaatgaaacttttgaaagttgcctcagtcagttttagttcttacaataaaagaaggttctaatagagaacagttttagtttggcagctgcatttcagtatcgaaagcagaagtgtttgcggcgcttcagcacggcagctgtaatcacccgtgcttatctggataaaaaaatgggggttcacaattgaagagggcaagtattgtgcgtgaaaagaaatattatgaattagtggaacaactaaaagacagaacaaaagacgtcacattttcatcaacaaaagcactaagtcttcttatgctgttcagcagatacctggtcaattacacaaatgttgaatgcgttcacgaaattaatgaagagtgtgcgaagcattatttcacttacttaatgaaaaaccataaacgtttaggaatcaatctgacggatattaagcggtccatgctcctgatcagcggcgtaatcgaggtggaggttgaccactatctgaaagatttctctctctcaaatgtaacattgtggatgacggaagagagatagacgtttgagatattcaagccaatgattatttggtagaatagaattaaaatgtttggcttgaggcggtgaaagcagtgtctgttcaatggggaattgaacttctgaaaagtatcggtctgttttttttgcacccgatgttctggttttttatcatcataagtctcgcatgcggatatttgcggatcaaacgtgaacgccatacgtttcatacaaaaatcgcggatatgtatgacgagcttatctttacatacataaaaggacttataccgggtattcttctctccatattattttttggactgggaatttcgattccattcggtcttctcggcataatcgcggctgtgacggctttggcttcgctgacgttccgtatgaattggctgtcctcagcttatattgtcagcgccggcatgttcattgcgtttatccttcagtatacccacacagcgccgtttgcggatcggtttccgcaggcattcggcgtgaattgggcatcggcggccgtgtttatgggccttttgattatcacggagggagcggctgcctgccgttcagcgcatctgaaaacatctccggcgcttgtcgtcagcagcagaggcctgcccatcggccgacaattggcgaatcgcgcatggctgcttccgcttttcttattggtgccgggcagcgggcttgagtcacacctttcttggtggcctgtctttaccgtgccgggcggctctttccatttgatctggattccttatatcgccggcttcgggcagcgcgtgcaggggtcacttccggaagtcagcataaggataacggcgaaacgtgtcatgattctcggggttatcgtggccgcattcggggcagcggccctttggtggactccgcttgccggagctgccgcttgtattgcggtgctcggacgcctgtttttatcattaagacagcggctgaacgataacgcggctccgttttatttctctaagcgggatcagggtttaatggtgctcggcatcattccgaatacacccgcggacgatcttgagctgaagatcggtgagattattacgaaagtaaacggcctccccgtaaaacatgtatcggatttttatgaagcacttcaaaaaaaccgcgcatttgtaaaaatggagatcatcggcctgaacggtgagatccggtttgatcagcgcgcgtcctatgaaggcgaacatcatgaattaggtattttattcgttcaggatgaacatgagcaagaagaaatgacagcattataatgtgatttttcataattattcggaatagtttcaagaactcctaaactagatttcaaaatcagctataaaagtaaaacagctaagaaaattatattttcttagctgttttattttgaaataataaaaaaataaatgaaggagaggtatggcttattggaaaggttattgctaactccaaaacctttagaagatgaatctttaacaggatatatattaagaataactgattataatggttatgttggataggaggagtacattattaaaaagcttttacttaagagattgccgttgatctcacttggagttatagcttatatactgacaaaatacgcgcagaaccatcaggattgggcggagaaatacagtaggtctgtatatccgttattgtcaaaaacagtaggacttgtaccttcttgggtcacattttctgttagtgaatggctcgtcgtgttggttgtgttactttttctattttatatcgtttattatgtgcgcaaggttatcatgagtaaaggtgtacgtaggatggtagtttatcgtggtgctctaggaatcgttacgatctgtaacgtgatatatttttgttatactattttgggtggaataaactatcacagatattcttttttgtctcataccgaatataaagaagagaactacagcaaggaagaactggttaaattgagtaagtcacttgccgttgaaatggaattggcaagggaaaagttagcggatactgatcttttggctcatgtaccagaggtttttgattattatgcacaacacgcagcgttctcgatgcaaatgttatcaaagaaatatcctgttttggagcattcatattcaacaccaaaaccagtggtgatgtcaaaactaatgtcgcatgcagggatacatggtatttttgtcccttttacttatgaatccaatatcaatgttaatgtgccagtttttttggtgcctgctactatggcgcatgaattggcacatcagagtggtttcatgcatgaggatgaggctaattttatagcttatctggcatgtaagcagcaggatgatccaatgatactatacagtggtttatttctggcatttgattattctatatctgagctaaagaaagtggatccagataaggcgtctgatataatgtccagtctgtccaaagcggtgcggcatgatatagaacaaaatgagcagtaccgggataagtatgagggtgttatttcaagtatttcaagaaatgtaaatgacgtatatctgaaggcaaataatcagacagacggtttgaatagctatagtgatatggtgaatttgttgctggcagagcagcgagagatagagaagtacaattaaatgtatcttgaatacttataggtttatatagtaatgatagtgggctcaagttgaacataggagtgagtgaaataaataaaataaaagtatttcctattccatatgctggagcgtcggtaaatgcatattatgaatggaaaaaactactgccggatagatatgaattgtgtatatgtgaattggctggaagaggaactcgattcacagagccttgttaccagtctgttggtgaagcaagtgaagatatcgccaaaagaataagtgaacaattagaatatgacgatgaatatgttatatttggacacagcatgggagccttattgacttatgagatatattataaacttaagcaaatgggaactaaggaaccaaggcatctgtttttttctgggcgagatgctccacatatttttgaaaagagagaagacattgaaaatatgactaatgaaactttcttgacaaaggtggaacaatatgggggaataccagaggagttttatacaaaagagattatggatatgtttcttccgattttgcgagcagattttataattttggacaattataagtttcagcccaaagcagaaaaaataagttgtggagtaagcgttttttatgcggatagcgatttttcgactcatatcaatgaaatgcataaatggagtgaagttgttgaaggaaacgtgaaatttcataagtttaaaggagaacattttttttttgaatcggtatcctaatgatattgtaaatactattgttaaagatacagagactcaaaatatttaccaggccacccacctggatcgcctagattttggtttagactttcttgtcccaatcaagttccaaaaataaaaatttagactttcttttctttgtacagtttgaatgtgttttgaaatattatatttaaaataaattttatcagtctgagaatccttcaatgattgttacttaattttgcttaattataaaagtaatattcaataattgttttaggtaggttttagtaaggagaattatgaaaaaaattaagaaaaaacattggaaataataagctttcagttttattaattatgaaaaatcacatataaaaagcccggtgccgctaacaacacggctgccgggctttttttacggccggattacgatgtaagcgccgaacttgatcggaactctcagccatttacattgcaacggcattgcggtgacactttgagagagaaaaataagaaggaaaactggaaaaggttccggaaagcgggtgctcacggaacctttttttgtttacgccgaatggctttttttcgtctgaacggtttccccggacttgataccaagcgatacgaacaagccgatcacagaaactccgatcaatatgataaacagaatatgaaacccggagattaaaccgatcagtgctgaagaaataatgcttccgaaataacggaaggtggagaaaatcccggatgcgatgccggacatgcccggttctaccgtcgcaagagaagatacctgcatgctcgtcagccccgcacctgacgcgatgcctccgacaataagcgatgccataagaaacggaacggaatgggaataaaccaaaagcagaaataagagattggctacggccatcagcccgaaggacagaaaaatcattcttcgcgcgccccatttctgatgcagctgagctccgccccagttgctggcggacatgaaaacagaaaagactgacagcgccatgccgctgtgcgacgtattcatgctgaagtggccggtcataaagagcggcataatcaataacacggcgtacatcattaaattgcttaatagaaccgacagattggcgctcgtaaaggtcgtgtttttaaacaggtcaaaatcaataatcggatgtttcgtgcgcagctcccgcctgaaaaatagcggaacaaatatgagaatgagcagcgcgtacacccaatagcccaaagagctttcatttttcgtcagaagaataatagatacaatgcttccggcaagcaaaacggacccgatgatatcaagcggagcgtcagacgtttcttctttatatttaggaaacatcactaatgccgtcacgagtgcgattgcaagaaacggaatgttgacccaaaagatcgaatgccagctgaagctctcaattaaaagagagccgataaacggaccgagagccgcgcccagcccggcaccgaggccgaaaaagccgaatactttcggaagccgtttttcagacacgacatggcggatgatggcgatgctgtttggcgtaagcaaagcgccgccggcagcctgaagcgcccggaagaaaatcaataagaaaagacttggcgagagggcgcaccccaatgatgcgatgagaaaaaggccgacgccccataaatacatttttttgtttccgtacatatcaccgagtttgccggcaatgggctgtgtcacggccatcacgattaaatacacggtcactacccatgtgatgctggcaattgattcgctgaatgagcgggaaatggatgaaagggcgactgcgatcatcgtagaattgatgggaacgagtatggctcccagcaaaagcgaaacaatcagcgcccattctttctttgaacccatccttcatcctccttggagccggaaaatgaccggccggtaatgcctttcatgaaaatctcagtgctgtgtttcagcatcgtttcctcagagagagtaatgactcttttccccagctgcagccggtgtataaaataaccgaaaatcatcgtcataaagacgtctgcattagcttcttcgctgccggggcttatcatatttttctttgtcagctccttaaaataaacgattaaatgctttttcacggattgcggatatacgacaatatcctgcaggacgtcttcgaatagttccggttcgcgcaggcagatgcggaatacttcttttttttgttccaattgctgaagaagggtcgtggcgaaatgaagaagatcctcatacagatcgccttccgccttagtgatcatgctttccggaaccggcgtctgctgttcaatcatggctttcattaatccttgtttgtttttaaaattacggaaaatcgttgcttcgcttacttttgctttttctgcgatttcttttgttgtcgctgcgcggtatcctttttggatgatcagattcatcgcggcgtcaataattctcttgttcgtcgtcctcaacatgtttcacctcgcgtaaatactggcaggacaagtatacacccgccctggccgtcaataaagagggaaacctagcatgaagcgcgtttgacaatcgtaatcttgccgtttgtcccgtccaccgtgacgatatctccgtcgttgagcctgtcagtcgcggcacgtgtgccgagcacggccgggagcccgtattctctcgcgatgatcgccgcatgtgacaggatgccgcccgtgtccgtaatgacggcctttgcatcctggaacagactggtccacagcggtgtcgtcattttgcagacaagcacgtctcctgttgaaaaacgggaaaattcacttgcgtcacgaatgactttcaccgggccgcttgcgattccgcttgacgccgcaagtccgtaaatttgatgttcagtgtttttttcatcttctgtgatggagccggtaatctgttcagccgttttcagctgttccgaagtcggagtcccgagataagcgggggcttcaagcaattgatattgctggaagagctgttttcgttcagcggctttttcctgcatcggaatcggcgacaccagcgctttctcgacttcatcgctgtataagtaccacatatcctcccgatcatcgattacgccttgtttttgaagcagctcgccgattttcagaaggcaaaggcgcgctttggcgtccagcatcgcatcaatataaaaatggtgatcatctttgatgacggatgaagacaatgtccactgataatagcggtcaaacgtttcccggaagccgtcatcttcaattctatccataaagtcggcgtagagctgttttcgtttttctatcgttttatgaaactcactgtcaaaatcgtatccgttccggacatagttctgaatgttggccaaagcgaaataagggttttccgcccaagtttcttcaatgagatcatgacttttcacggatctccagccgtattcctgtaaaaattcaccgacttgttcgagaaagcgttttccctcatttgattgcagaagcgtctgatgcagctcgtcggcatgagaaaccgtaaagacgcgccgcagctcagggctgtcttttacttgtccggaaagcagccagagctgtctgtcggtttccaatgacttattcatgacgccagccagcatttcatacagaagggaggtgttttctttctcaacctgtccgtacatagattccagtatcatgtttaacgcaacctgcggaaagacaatattgaaatgttctgcgtatccttttaaatagaagtcttgcaggtttcggaacgcatcaagggcagtctccggcgtatggtctgtatgcgccagttcgtccagcttttgataaaaaggcagaaaggtttcctgaataatatcgtacatacggtcagccaaaacggggaaaagcgcttctaactgttctgcgggcagcttgtcgtccgtcttatgctgtctggaaaaaacacggccctgatgaagtttgacacgctcgatttcgatgcccattacagggaatgtcttcgtgctctctttgaggccgtattccaaagccggcacaatgagtgaggcgaataacgggctgacggggccttctatattggcctccatattgagccaaaaatctttctgatctcggggcgtcatgataaattcccgttcttcgtctgccgctttctgatcctgcacgatcgttgtaatcggcctggcctgaagcagatacagcttattttcggcaaatccgaattcgagatccacgggataaccgtacagttcttccgtctttatcgtcagcatggcaagctctttgacgctctcgtcatcaaggcagaagcggtttctcatgtcagcggacgtctctttttccgtcacgccttcgtctttagaaacgatatacatttcttttaagccgatttctttttcaatctgaaatgtgtctttattgacgataaatgtgtcgggcgtcacgctgccggagacgattgcttctccgagaccgtagctcgcgctgatcatcagctctccgtcatcatgtgtgacggggttgcggctgaaaatgactcctgaaacctcggaattgataagcccttgcacgacaacgcccattaacggttctgcggtgtcattgttcattttctctttataaccgctgacccgcgccgagaagaaggatgcccagcattctttcacttttccgagaaactcttcttctgttttgatatttaaataggtttcgtactggcccgcgaaagaagccccttcaagatcttcggacgcggaggaggaacgtacggcgacagaggcgtatgattctctcaattcataaaacgacgcggtcagttcctcccgaagctcttttgaaaacgtgccgttcataatggcgcgctccatctgttcctgatctgcttgaagcccgttgtcttccataaaacgtgtcagggcattcgtctgaatgatgaaaccgccgggaacgggcagcccgtttttcgtcagtttaatcaggttcattccttttgctcctgcagagcggctcgattcttccgctttttgaaatcgcactgaatacatgcggtatgacccccctttttttcttcatccaagaaaatgatagtaaacactatcattacattgtaaagagggaggaagaaactgtcaaagatacaaagacctaaaccttctcatcctttcggatgaagaaaggtaattcgattcatctggttaatggttcaatggatttatattcacaatttttttgacagatgattgaagactgctgaaaaagggtattgtgatagcaggggaacgattgtccgattcttcattttttactataatcagatgagatgaagaattcccgaggagggtttttgtgattacaaaagccgtttttgcattatgtttcccttttatgctggtcgtcctttttacgcgcgtcacgtttaaccactatgtggcgatcgctctcacagccgcactgcttttcgcatcctatttaaagggttataccgaaacgtattttatcgtgggattggatgttgtatcgctggtggccggagggctgtacatggccaaaaaagaagcagacaaaaagaaagacaatgcctgacatggtgaatatgaaatagaatgcctgcttttacgccataaaagcaggttttttatacaaaaattgacttggtaaaaacaaaccatcgaactttagttcgtatttttagtgattttgcccgtcattgtgttactatatcaataggaagatttcgtaaagaaacggaggcttttttgtgaaagatcgttttgagttagtctcgaaatatcagccccagggagatcagccgcaagcgattgagaagcttgtcaaaggcatacaggaaggcagaaaacaccagactctcctgggtgcgacagggacgggcaaaacctttaccgtgtccaatctgattaaagaagtgaataaaccgacactggtcattgcccataacaaaaccctagccggacagctgtacagcgagtttaaggagtttttcccgaacaacgctgtcgaatattttgtcagctattacgattactatcagccggaggcgtacgtgcctcaaacggatacttttatagagaaagacgcaagcattaatgatgaaattgataaactgagacactccgcgacatcctctctgtttgaacggagagatgtcattattattgcgagtgtgtcatgcatatacggtctcggttcgcctgaagaataccgggaaatggttgtgtcgctcagaccggaaatggagattgagcgtaacgagctgctgagaaagcttgtggatatccagtatgcccgcaatgatatcgactttcagcgcgggacgttccgcgtgcgcggagacgttgtggaaatctttccggcttcccgtgacgaacattgtatcagagtggaatttttcggagacgaaattgagcggatcagagaggtcgacgctttgaccggagaaattctcggcgaccgtgaccatgtcgcaattttcccggcttcccacttcgtcacccgggcggaaaagatggaaaaagcgattctgaatattgaacaggagcttgaggagcgcttgaaagtgatgcacgaaaacggcaagctccttgaagcgcagcggcttgagcagcggacgagatatgatcttgaaatgatgcgggaaatgggtttttgctcagggatcgagaactattcaagacatttgacactccgtccgccgggctctacgccgtatacgctgcttgattatttcccggacgattttatgattgtcgttgatgaatcacatgtgacgattccgcaggtgcgcggcatgttcaacggtgaccaggcgagaaaacaggtgcttgtcgatcacgggttccgcctgccgtcagcgcttgacaaccgtccgctccgattcgaggaatttgagaaacacatgcacaatatcgtgtacgtgtcggcgactccgggaccgtatgaaattgagcatacgccggaaatgatcgagcagatcatcagaccgacgggactcctcgatcccctcattgacgtccgtccgatcgaaggacagattgatgatctgatcggcgagattcaggcgagaattgaacggaatgagcgcgttcttgtgacgactttaacgaaaaaaatgtcagaggatctgaccgattatctcaaggaaatcggcatcaaggtcaattatctgcattccgagattaagacgcttgaacggattgaaatcatccgtgacctccgcctcggaaaacatgatgtgttaatcggcatcaacctgctgagggaagggcttgatattccggaagtgtcacttgtcgccattctcgatgcggataaagaaggcttcctccgttccgaacgttcgctgattcagacgatcggacgggcggcacgaaacgcggaaggccgcgtcatcatgtatgccgataaaatcacgaattcgatggaaatcgcgattaatgaaacgaagcgccgccgggaacagcaggagcgctttaacgaaattcacggcattacgccgcaaacgatcaataaggaaatccgcgatgtgatccgcgcgacgcaggccgctgaggataaagaagaatataaaacaaaagccgcgcctaaactggcgaagatgacgaagaaagaacgccagaaagtcgttgaacaaatggagcacgaaatgaaagaagcggccagagcgcttgatttcgagcgggcggcagagcttcgtgatttactgttagagcttaaagcggaaggatgatgaacacatggcaattgaccggatcgaggtgaaaggcgcgagggcgcacaatttaaaaaacattgatgtaacgattccgcgggatcagctcgtcgtcgtgacggggctgtccggatcgggaaaatcatcccttgcctttgacaccatttatgcggaaggacagaggcggtatgttgaatcgctttctgcctatgcgcgccaatttttagggcagatggataagccggacgtcgatgcgatcgaagggctttctccggcgatcagcattgatcagaaaacgacgagccgcaatccgcggtcaaccgtcggaacggtaacggagatttatgattatctccggctgctgtacgcgagagtcgggaagccgcactgcccggagcacggcattgaaattacgtcgcaaacgattgaacagatggttgaccggattcttgaatatccggagcggacgaagcttcaagtgcttgcgccgatcatctcaggcagaaaaggcgcccatgtcaaagtgcttgaccaaatcagaaagcaaggttacgtaagggtgcggattgacggagaaatggccgagctttccgacgatattgaacttgaaaaaaacaaaaagcattccattgaagtcgtcattgaccggattgtcgtcaaggaaggggttgccgcccggctttccgactcactggaaaccgcactccgattaggggaaggccgtgtcatgatagatgtcatcggtcaggaggagctgatgttcagcgagcatcacgcctgtccgctgtgcggtttttctatcggggagcttgaaccccggctgttttcgtttaacagcccgttcggcgcctgtccgacttgtgacggtctcggcttgaagctggaagtggaccctgagctcgtcattcccaatcctgagctgtcattaaaagaacacgccatcgcgccgtggacgccgatcagttcacaatattatccgcagctgcttcaggcggtctgccgccattacggcattgatatggagactccggtcaaagacctgccgaagcatcagcttgataaagtgctgtacggcagcggcgatgaacggatctactttaaatacgagaatgatttcggacaagtgcgcgaaaatgaaattgaatttgaaggcgtactgcgcaatattgagagacggtataaagagacaagctccgattatatccgtgaacagatggagcagtacatgtcacagaagccgtgcccgacgtgcaaaggctaccggctgaagaaagaagcgctggccgttttggtcaacgggcgccacatcggcaccattaccgagctttccgtcggcgatgcgctggaatttttcaaaaaactgacactgtctgagaaagatatgcagattgccgatttaattttaagagagattgtggagcggctcagcttcttagataaagtcggtcttgattacctgacgctgagccgggcggcgggaacgctgtcaggcggagaagcccagcgcatcaggcttgcaacgcagatcggctcccgtttgtcaggcgtcctgtacattcttgatgagccgtccatcggccttcaccagcgtgacaatgaccgtctgatcagcgcgctgaaaaacatgagggatctcggcaacacactgattgtcgtggagcatgatgaggatacgatgatggctgccgattatttgatagatatcggtccgggcgccggcattcacggcggccgcgtcatatcggcggggacgcctgaagaagtgatgaatgatgcggactctctgaccggacgctatttgtcaggggctcaattcatcccgatgcctccggagagaagaaagcctgacggccggttcattgaaatcaaaggcgcttcagaaaacaacctgaaaaaagcgaacgccaaattcccgctcggcacttttacggcggtgacaggtgtgtccggttccggaaaaagtacgcttgtgaatgaaattctgcataaggcgcttgcgcaaaagcttcataaagccaaagcgaaaccgggaagccataaagagatcaaaggcctcgaccaccttgataaggtgatcgacatcgaccaggcgccgatcggccggacaccgagatcaaatccggcaacttatacgggtgtgtttgatgatatccgcgatgtattcgcgcagacaaatgaagcaaaggtgcgcggctataaaaaaggccggttcagttttaatgtaaaaggcgggcgctgtgaggcctgccgcggcgacggcatcatcaaaattgagatgcacttccttcctgacgtgtacgttccgtgtgaagtgtgccacggcaaacgttacaaccgggagacgcttgaggtcacatacaaaggaaaaagcatttctgacgttctggatatgacggtggaagatgctctgtctttctttgaaaatatcccgaaaatcaaacgcaagcttcaaacgcttgccgatgtcggactcgggtatgtgacgctcggccagccggcgacgacgctgtcaggcggagaagcgcagcgcgtcaagctcgcttccgaactgcataagcgttccaccggccggacgctgtatattttggacgaaccgacgacaggcctccacgttgatgatatcgcaaggcttttggttgtgcttcaaagactcgtcgataacggtgataccgttttggtcattgaacataatctcgatatcattaaaacggctgactacatcgtcgatctgggacctgaaggcggagcgggcggcggcacgatcgtagcctccgggacgcctgaagaagttgtcgaagtgaaagaatcatatacgggccgctatctgaaaccggtaatggaacgtgatagaaaacggatgaaaacattgctggccgaaaaagaaacggcagccacgtaatagatcaataacaacagcccaaaactcatcggttttgggctgttgttgttacaggctttttttctgttggggaagctgtctgcttaaatgcattaagtcctgcagaatatgggtgctgctgctgtccagcagcacttttatatattggatatcatgggaaatgggaagaggggctgctttgatctgttccaattcagccagcatttcgctgttcattcttttctgttcgcgaattaaatttcgaagactctcttccgttacttgggcgtttgcgggatctttctccatttgtatgtcctccttgcatacggtcaggctttgttacatattgtaatcggttcggggaaaagattctatagtgaaatctctgaaatcaaaaattacgtataacgaagcatgtccttagcatgaaaatgaaacccgcccattcgtcatacgtatgtataaggaagggtttttacatcacggcacagggagtgtttttattgaaccgaaatcaagcgattatcgcatcaatctgttatttcagcgtgtttctcgcgccgctcattcttccgattgtggcttactttgtcgtcgatgaaaaagagacgaagcggcatgccatgcgcgctctgatttcccatatcattccgtttgcgggattgctgattgtgaccgcgggtgttgtcggcggattgattacggctcagggggagagtatggtgcccgtttttgttatgataacaggagcagctgtttattttctgatcctcatcggaatggtcatttggaatatcgtgcagggaattaaggtgttacgccaggtgtaagaaaagtcgggggaggcgttttgtatgaaacaggagaaagaacggattttaaagcttgtggaagacggcatgctgacggcgcaggaagcactgacgctcattgaaaaactggatcatgaatataaagaaaaagaagagcagatcaccgcattatctgcggaggtccaggaacctgcggaagatttcgaaagcggggcaaaaggaagccaaaagccgtcccttggggcgaagctgttcgactggattgattctgccgtcaaaaaagtgaaggaagcggatcttgatctgaatttcggccacgcacacgaagtgcagcatatttttcaatttaaagacagtgaattctcggccattgatatgcagatcgcaaacggcagcgtcaatatcgtgccgtgggcggatgaagatatcagagcggagtgccaggcgaaagtgtaccgggcggacagtcaggaggcggcgcgcaccgcatttcttcagcacattgagtgtgaagtgaagggcaataagttttttgtccgcacggaaaagaaaacgatgaaaaccaatgtcacgctttatgttccccagaaagagtacgataagataagagtgaagctgtttaacggaccgatcagaggggaacatttacatgtaaaagaattctcggcgaaaacgacaaacggcgttctgtcattctctcatttgacggctgataaagcgtcggcggaaacggctaacggacaaatcaagctggccggacatcaatgcggcgcgattgaagcggaaacgatcaacggcttgattgatttgcgcggatcgagtgaatccattgacgttcaaagctttaacggcaatatcatgcttaccgtgacagcgccgcactgccgctccatctacacgaaaacgacgaccggaaacgtggatatcgctctgcctgatgattcggcggtgaaagcggagctgaaaagcaatctcggctctctcagccatgagctgattgatgcggaaattttaaaggaaaagaatgataccattcaaaaagaactgatgctggcatcaaatcaaggccatgatcagcatctctcgattttctcagaatcgttaacaggagccattaagctcaagcatactcagaggtgattggatgaaaagactttaccgttcagaaaaaaaccgtaaaatcgccggcgttgtcggcggtttggcggagtacgtcaatatggatgcgtcgcttttacgcattatcaccgttgtattagcgcttgtcacgagcggaatcgtgccgattgtatatattatctggtgttttgttgtacctttagaaggagatttgaaataaatgatcaaatgggcagtcagcattttagtaaatgctttattattaatcgttatcgcgggatattttgattccgtccatatcagcagtatcggagcggctgtcatcgccagtgtgattctttctgtgttaaatgtactgatcaagccgatcatcgtcatattgacattgcccgtcacggttgtgaccctcggcctctttctgtttgtcatcaacgccattacgttaatgatgaccgcagccttgatgggagacagctttcagattgatgggttcggcaccgccatttgggcatccgtcgtgctgtccgttttccacttgctgatccaaaaaggcatattggagccgcttagaaaaaggtaaaaaacgagctgtcccgagagggcagcttttttatgtgtgatttacataagcggcagcctcctgacgcaacataatgcatagggaggtaatgagatgaaacttgtgatgacgctcttttttctgattggtttgctttgtgtgagtccttctgcggatgcggcgcgcaaagaatcggcaatccccgtgaatcagcaggaattcggacagccgcctcattacataccgcttctggagaatcctccccaaatcgaagtaaaggcggaaatgaaaagaaacctgttcatacaggctcatgtacggaatgctgactatcaagcattttcggcgtttcttttttataaacaaagcaatgagctggggtttaaaatggtgccgatggagcccgcgccaggcgcaatccggctgtttacggcccaggtttcaaagcgggatatctggaatggagaattggaatattacctcgttttcaccaacggcagacagcgggcggaatcggagaaaaagcggctgaagctggacggctatcaagccgatttgaatcatattcccgagctgatgattacggagcttgcggttgatacgaaaaatgaagacggcgctgatgcctatgaatttatcgaggtgtataacacgacggacagacccattcattttaaagactatcacatccgctaccgctatccgaaggaagggccggaatcagatatgatatggaggccgaaagaagataccgtcattccgtcaggcgggacttacgtgttttggctgagacgcgccgcatcagaactgacgatagatgatttcaatcgctattacggcacacgtctgaaggagggagaacatctcgccgtcatcgaagggacggacggaatgtccaacggccgcccgcgtacggtggtgctgtcggcaaataccggaaagggtatcgcctcagcgcattaccggaagcacgctttccgccggctgacttctttgctgtacaaatatccgctgaacggaacgggagaattgctgaggatctccacgagcgagcataagccgtcaccgggctctgtttttcaggcgcagatcccgcagcagaaaagggtgataaaacccgacaaggaaaaaccggtcatcgaagaccttacagacagaaagcccgtccggcccgctgaaagcattgaattaaaggctgacataaaagacaaaaaccttgtcaaaacagccgcgttttattaccggaccaatgagaaaaaaccattcaaacgaattctggccgaaaaagaccgcaacgacagcttataccatcatattctttattccccggaactgctcggtcaggatcagcttgagtattatatcgcagccagtgatggagaaaatgaagcaaaaacgcccgtcaagatgattgacattgaacagacgagcaaatcacacggactcagaatgaatgttgaacccgaagatacgatatccggcacctatctgctcaaagcgacttccgacgtcagcgccgataagatcaagctgtggattgacggcaagcggcaggagacccggccggcgctggaaaaagaggtctatttcgccttcgatgcccggaaaacgaatctttattttcaaaacaccgtcataatggaaaacgaggtgctgcacatttttgacgatccgtctcaccgctacagaacgcactcggttctccttccggaacgtctgctgcaaaaagggggcaaaacgcagaaagtatccatccgttcgggctcaaaggtttctccgtatgacacgggagagaatcgggatgattttgtcgtgaaacatgcccgtctggtgctttcggacggaacggtgatcaaagacgggaagacggacccggctgatcagctgtttatcggtgacggcaggcgggcgaatcagcagaagaccttctcattcagcctgccggatcatttgtttacgtcacggctgctgccgtggaacacggcgaagctttctgaaggctatcaccatatttttgttagcgacggtgaggagcagctgagccaatctgtgcgggtggacaatacggggccgaagattgtcccgggtatcaaagaaggagcggcgctgaaaggtaatgttgagctgaatgcggacatccgtgacaaatggagcaaagtggaagaggtcaaagcgtttttggacggagaaagcattacgctcccgcaccacacgtcatcagccgatctcaagcccggaaaacatacccttaccatcattgcggcagaccttgccggaaatgaaacaacgtccgtccgcaccttccatatcaaacgggaggagccgaaccagccggagcttgccgatcaaaaaatcggcgcccacaaagcaaagctgtccgtccgggtaaaagacccgacgaaggatgacatgaatgtatcattttatcgcggcttccgttataccgcgcggaatccgggcagcgtgaaagtgtataaacacgcctcattaacggaaccgccgaggggcataaaagaaaatgaaatgccgtttaccctgccggaaatgaaccgcatctcggcaaatgacggaaaaaccgtatcgacggaaagtgtggagcgttttccttatcaccgattcgaagtctccgttgacccgtctatcgacgaaacggatctggccgaggcggtctggaaaggaagctctctgcccggccgaaaggtaaccatgtatatttggaattaccggacaagccgctggcaggaggcggacagcgttcttgccaaagataaaaagccgtttacattaaaagccgccgtttccgcagcggatgtggtgaagaactcaaaaatgaatgtcatcgtgcaggatcaaataccggcgaaaggcaattacacgtttgtctggatgtcggatacacaatattacgcacaagggcacccgcacatttttgacaaaatgacggagtggatcaaagaaaataaggacaagcacaatattaaatatgtctttcataccggtgatatcgtcgatgattcaatggtgatgaaacagtggaaaaacgccgatcactccatgcggacgcttgacaaggcggggattccgtacggagtgcttgccggcaatcacgacgtcggccataaagacggcacataccgaaccttcggggatttcttcgggagccgccggtttgaacagaacatgcattacggcggatcatacaaaaataaccgcgggcattatgacctgctgtcggcaagcgggaacgattttattatgatttatatgggctggggcattgcggaacaagagattgactggatcaatcaagtgctgaagaggtatccggaccgaaccgctatcttatgctttcatgagtacttgcttgtgagcggaaatcgaagcccgatcggggaaacgatctatcgaaaagtcgtcaagccgaatcgcaatgtggcgatggtattaagcggccattaccataacgccatgaaaaaaaccgatgcgcttgacgatgacggggacggaaaaccggaccgcctcgtccaccaaattctgaccgactaccaggacggtccggaaggggggcagggctttatgcgcatgatgcaattcgatcaggccgccaatcaggttcacatgttctcctactcgccgtacacggatgacatcaattactatgacaccgatctgttcgctgataaagacgaattctcagcagaaatggatttacagccgaagaggaaaagggtggcgaccgattattttgaatgcaacgtctatacgaacgaactgctcggtcataaaaaacacgtaaaaagcggaaaaaccgcaaattgggtctgggacggcctgcagcctgattccgtttattactggtacaccgtcgttaaggacccgtacaacggcaaaacaatatcaccgctgtggatgttcaaaacgggaaatacgccgtatcgcccggctccggatcagtttgatttcaggcatgcctcaaacccataacgaaaaaatacatcctgctgatcgctcagaagaaaatctgacggtcagcaggattttttctgtgcgtaaatggcggcgccctgctgtgataagtgcttttgacttttttatgtcccttttctatactaaaatcgattggttttcgtaatatgcaggaggaaacataatgaacagtaaaaccgggacaaaagaaagaattattcaaacctctgcatatctttttcagattcagggatatcatgcgactggtttgaatcaaattataaaagagagcggagcaccccgagggtctgtgtatcatcactttccaaacggaaaagcagaactcgccattgcggcgatcaaatatacgggaagatgcgttgaaaagcaaatacagaatagtatgtctcaattcgcggatcctatagaagcgattcagcactttattcatgtaacggctgaacagtttaatgatccgcagaatattgagggcgtgccggttggattgctggcgggtgagaccgctctgatcaatgaaacgttaagatgcacatgtgttgaggtgttcaagaagtggacggatgtgtttgcggcaaaatttcttgagcatgggtttgaacgagaggaagcggagaagctcggggtgacaatcaactcgatgattgaaggcgcaatcatgttttcgctggctcataaaaacaaagaaccgctgctgctggtttcaaagcaggttccgtatattgtccaaaacagagggtagcattttattactcttttctttataaaaatagataccagaaccacagcctcttcgttttgacagagtcatagagaccattcaccggcttgatttgaaaatggcagatcaaaaaaacatctccaacccgtaacggttggagatgtttcatttcaccctgtccatataatgcacgaatgtgtagcggtcgcctctgtaggcggatttgacgtgctcaaaggcagtgccgtcctgcagataagtggtccgcttgatatagaggacgggggcgccgggctggataccgagcagctcagcttcttcctcggaagcggctcccggttcaagctcttgttttgcccgtgagatcggcatctgattgtacgcttcaatatgctcatacatggatgattgaaaatgagaggcgtccagttttcccgctttgtcaaacggaatgtacgaggcttcaatcgccatcgggatatcatttgccagccggacgcggatgattttatgaagcgttgccggatagccgcatcccaggatagaagataattcttccgtcgcctgaatcagctggtattcggcaagtctgctccccggcttcatgccccggcttctcatatcttccgtaaagcttgtcagcccttgaagcggctgttccatcttcagtttgctgacgaacgttccccggcctttctgcctgtataaaaatccttcattgaccagattggaaagcgcctggcgcaccgtcattcggctgatgccgaattgttcggcgtattcccgctccgacggaagcagcgcatccgctttcagctcgccgtttttgatttgtgtttttaattgttccataatctgaaagtaaatcggaatcggagattgtttatcaatctgcataggtcaaatcctttcaatcgccgcccgcagccttttcatcaatcaagaccgtcacatccggatgcgcgtgcagggcggaggcggggaatgcttcgctgatgcgcccgtccagaagctgcttcaccgcttgggccttgctttttccggatgccatgatcaaaatccgtttgccggacaaaatcgtcccgatccccattgtcagggcttttacagggacttgatcaattgacggaaagtaccgcgcattcgcctgtcttgtctcttcattcagctcaacaacatgggttcgggattcaaatggcgtcccgggttcattaaagccgatatggccgttgtgtccgatgcctaaaagctgtatatccgctccgccgagtgtttgaatcaatcggtcatagcgtccgcattcggcatcaagatcgtctgcccgtccgtcagggagaaagtggcggtcctttcggctgtcgatatgtgcaaaaaaatgtgtattcatataataatgatagctgtttttgtcctcgggagaaagccctgcgtattcatcaaggttgatcgtcgtgacattccggaatgacaagccttctgagcggtgcatccgcacaagttctttgtatacgccttcaggagtgcctcccgtcgcaaggccgagaacggcatccggcttttgtttcactgtttcagcaataatcgatgcggctttttcacttaattcttcataatgtctgcatgtgataacgttcatgtccaatcaccctcccttgagatatatgcggtgtttcctcggcaaatcgtggccagcacgccgcactgtccgtcggtcagaacaacgtcggcgtcttttccttccgcgatgcttcctttacggtcgaatatgccgaggcggcgggccgcatttgccgatgtcatatttgctatatccagccatgagcagtttgtaaacctgcgcatgagcgccgcgccttcattcatttttaaaatggaaccggccagcgtcccgtcagagagaagcgccgtgtccccgcgaacggtgactttttgtccgccgaattcatattctccgtccttaagcccttttgcccgcatggagtctgtaatcatgatcaggttttggcttcctttcgccaaataggcaagcttaacggccaaaggatgggaatgaatgccgtcggtgatcagctccgccgtgatgcggccgcaggcgagagccgtaccgatgccccccggctcacggtgatgaaaggagctcatggcattgaagaggtgcgtcatatgcactgctccggcatccgccgctttttgtaaaagctcggctcccgcgtctgtgtgtcccattgacgggatgatgttttggtcttttaaataacggatcaggctgaaatcaggatcttcttccggcgcaagcgtcacgattttgatcatccctcccgagagccgctcccatttctgaaagagcccggcatcagcaggagtaatccattgtttcggctgtgctcccgccttttttggagagacaaacggtccttctaaatgaatgccgatcaactcagcgcctttttgggcctgcggtgaggaagacgtccattctttggcgttgacgagcgctttttcaatgttttcgtgctgttgtgtgatcgttgtcgctagaaaagaggttgttccttcttcgggcagccgggcggacattgtatcaagagctgcaacatcagcatccatcgtatccgcgccgtatccgccgtgaatatgaatatcaatcattccaggaagcgcatatgaaccctcgggcgccttccattccttctcatacgtttcttgcggtcttgttttccccgcgtaagaaatgatgccgttctttataccgagaaatccgtttcggatgatttcttcttctgttacgatgtccgcaccgctgattaacaagctttcagccactttaaaacacgcctttctggttagttgttagttttattttactctttttcagactagttatctagaccagttatgccggaattgtataaatctgttttggttcagacggtaaagtgataaaatataactgttcaaagctcggaacatcccagaacaggaggaacatatcttggcaaaggttcggaccaaagacgtaatggagcagttccatttagaattgatcagcggagaagaagggattaaccgcccgattacgatgagtgatttatcacggcccggtattgaaatcgccggttattttacatattacccgagagaacgggtgcagcttttaggaaaaacggagctgtcatttttcgatcagcttcccgaggaagataagaaacagcggatgaaatcgctgtgcaccgatgtgacgcctgctatcatactttccagagatatgccgatcccgccggagcttgtagaagcttccgagcaaaacggtgtgcctgtgctcagatcccctctgaaaacaaccaggctgtcaagccggctgacgaattttcttgagagccgtctcgcgccgacaaccgccattcacggcgtgcttgtggatatatacggcgtcggcgtgctcattacgggaaaaagcggcgtcggtaaaagtgaaacggcgctggagcttgtcaaacgaggccatcgtcttgtcgcggatgactgcgttgaaatccggcaggaggatcaggatacccttgtcgggaacgcgcctgatctgattgagcatctgctcgaaatcagggggctcggcattataaatgtcatgacgctgtttggagcgggcgccgtcagaagcaataaaagaattacgatcgtcatggaccttgagctttgggagcaagggaaacaatacgaccgtctcggacttgaagaagaaaaaatgaaaatcattgatacggaaattacaaaactgaccattcccgtccgcccggggcggaatctcgctgttattatcgaagttgcggcgatgaacttcagattgaagcggatgggcttaaatgctgccgagcaattcacgaataagctggcggatgtcattgaggacggcgaacaagacgaataggagttggcaatgatatgaatgaagcaggaacaccaatcaatccgattgcctttcagctcgggccgttatccgtgcactggtacggaatcattatcggcgcgggcgcgttattagggctttggatggccatgagggagagtgaaaagcgggggctgaaaaaggacatttttattgatcttgttcttttcgccatcccgatcgcaatcatttgcgcaagggcatattatgtgcttttcgagtggagctattactcggaacaccccggggaaatcattaaaatttggaaaggcggcattgcgattcacggcggattaatcggcgcgatcgcaacgggaatcgtcttttcaaaagtaagaggcatctcattctggaagctggcggatattgccgcgccgagtattctgcttggccaggccatcgggcgctgggggaactttatcaaccaggaggctcacggtgaagcggtcagccggtcatttttggaaagtctgcatcttccggatttcatcattaatcagatgtacatagacggacaatattatcacccgacgtttttgtatgaatcgctgtggagttttgcgggcgtcgtgattctgcttctgctccgccgcgtgaacctgcgcaggggcgatctgtttttgacgtatgtgatctggtattcgatcggcagatactttattgagggaatgcggacggacagcctgatgcttacgagccagcttcggatcgcgcaggtcatttccattgtgctgattgtacttgcgattattttaatgattttcagacgcatgaaggggtatgccgataagcggtatgctgacacggactgacgcctgaaatcggaaaggacataagatgactgataaacgtgtaaccgccattttatttgatctagacggcacgctgattgacacgaatgaactgattatcgcttcttaccttcatacgcttgatcattattgcccggggcagttcaaaagggaagatgtgcttccgtttatcggcccgcctctgtatgaaacgttttcaggcattaatgctgaaaagtgcgatgagatgatcagcatgtacagagcattcaaccatgaaaagcacgatgagctcgtcacggagtacgaaacggtttatgaaacgctggatgaattgaaaaaagcggggtatcagctcggtattgtcaccacgaagctgagggatacagtcaatatgggattgaagctgacaggcatcggggcgtttttcgatactgtcgtcacgcttgatgatgtcaagcatccgaagcctgaccccgagcctgtgcggcttgcgctcagccggcttgggtgcgatccgtcggaagccataatggtcggtgacaattatcacgatgtcatggcgggcaaaaacgccggcacgaaaacagccggcgtcgcgtggacgattaaaggcgcacagacgctttccgcctatgaacccgattatatgctcgagaaaatgagtgatttattgcacatcaccggagtgaagtaatccgtgagaaaaacagaccgccatccggtttcaggtgcaaattcattgtggcatgtttatcagacggttccctttctgaaggtgatgaaaaatttcatcatcattcagatcgcaaggtatacgccgtttttaagcgtgaaaaactggctgtaccgaacctttttgaaaatgaatgtcggaaaacaaacctcattcgcgctgatggtgatgccggatattatgtttcctgaaaaaatcactgtcggagaaaacagcatcatcggctacaatacgacaattttggctcatgaatatttaatacatgagtaccggaccggttttgtcacaatcggtgacgaggtgatgatcggggcaaacacaaccattctgcccggcgtcaccatcgggagcggagccgttgtatcagccggcacgctggtgcacaaagatgtcccggccggggcgtttgtcggaggaaatccgatgcaggtgatctatacggacgaagaaatgaaaaaacgaatggaaaaccccgctgattaacgtcagcggggtttttttatgacttgatcacaatggcctggctgcccatctgcttccaggctttttcaaagtcagatcggtctgtttttctgtttttatagccgtaaggatcattaacgtatacataatcgtgatcataaccggtgacggctacgctatgcatgctgaacgtaatgtcgatttttccgttcggcgtattccaagtctgcatattatcaaccggcttaaaggatgtggtggtaatcacccagaccggccgccctttttcaagctggcggtacactgaagaaatgtcttttcccgtcaggtcgtatactttgtttcccgcatattctttggcgagtttatcaatcggctcatgataaacgcctaaacccgggccgttttccatatctccggcaaatccttcattcggatctcccttcagcccgctgctgtatgtgagcggaactttattgattttatccgccaatgtattttttgacacatgatatccggcattgttcaaaatcatggcaaggcttgtcacctcacagccattgtacagtctgggagaatccatctgtctgtacagaacgacattcagcggtgacgcgctcccttttaacggtgttttctcatcaggctcgtcggactgctgattaaaaaaattcaaatgaatatcgtttgtatagatgttatacccgagatagacaaggatggctgtcagaatcagcacacataatgttccaagcgtcttcattattactctcccttgttctgatgaagctattctatgtattatagcacttctgctcaatatgattcgatcgttccgatatgtttacaggtttgttcattctttagccaagtttatggaaaagaataggcggacattgggcgttgcaattcattcttttatctgctaacatattatcatattaacgaactaaaggattcggaattttccttcagacaaagcggaggtgtaaaaggcaaatgtttatgtttgagaaaccgcatggcatgagagatacgctgcccggtttatatgaagcaaagaaaaaagtccgttccacactgacggatttaattgataaatggggttatcagtttatggagacgccgacccttgaattctatgaaacagtaggcgtccagtcagccattgaagaacagcagctgtttaagcttctcgaccaggacggaaaaacgcttgtgcttcggcctgacatgaccggaccgattgccagggtggcggcgtctaagctgcacaaacacaatcatccgctcagggcggggtacgcggcaagcgtctatcgcgctcaggagcgggaaggcggacgcccggccgaatttgaacaggtcggcgcggagctgatcggcgacggatcaacaagcgcggacgccgaggtgattgcgctggcggccggcgctttgaaaaacgcgggattgcaccgatttaaaatcgcgatcggccatgccggactcgctgatgagctgtttgtcgaggttttgggcaatgccgagcgggcggatgttctgcggcgctttctttttgaaaaaaattacgtgggatacagggaacatgtcaaatcgcttccgctctcttcaatagacaaaagccggctgctcgcacttctggaattgcgaggcgggaaagagatctgcgccaaggcggaggagatcatcggcatctccggacaaagcttgattcaggagctggaagacctgtgggacattcttgaggattacgggtgtgccgagcatattcgccttgatctgaatatggtcagccatatgagttattacacgggaattttattcgaagtgtatgcggccaatgtcggttttgtcatcggaagcggcggacgctataacaatctactcggccatttcggcagtcccgctcccgccacgggtttcgggctccgtatcgacaggctgattgaagcgctcggcatccaggaagaaacaagtgaagcggacgccgtgattttcagcaaggagcagcgggcgcaggccattttattcgctgaggaagaaagggcgagaggcagaaaagtcgtcctgcaggatctggcgggcattgaaaatatcgatcatatgacaaaatcattcgcaaacgtcacatactttatcggtgccagaaaggaagagcagaatgggtaaggtactcacaatggcaatgccaaaaggacggatattcgaagaagcggccgggttgctgcggcaggccgggtacaggctgcccgaggagtttgaagaatcgagaaagctgatcattgacgttcctgaagaaaatctccgctttattctggcaaagccgatggatgtgacgacttatgtcgagcatggcgtcgctgatgccggtattgccggaaaggatgtcatgcttgaggaagagcgtgacgtgtatgaggtgctcgatctgaaaatcagcaaatgccatctcgccgttgcggagcttcccggagcggattggaacggagtcgccccgaggattgcgacgaaatatccgaatgttgcgtcaagttatttcagagagcagggcgagcaggtggaaatcattaagctgaatggttcgattgaattggcgcctttaatcgggcttgctgacagaatcgtagatatcgtatcaaccgggcggacattaaaggaaaatggtctcgttgaatcagaacatatttgtgacatcacatcgcgttttatcgtcaatccggtcagctaccgcatgaaggatgatgtaatcgacgaaatggcggccaggctggccaaggttgtggaaggagaaacggcacaatgaaaataaccgcagtaaatagaagcgagcggttctcactgaagcgttccatcgacagcggaaccgaagagcagcggaaaatcgtcagggggattattgaagacgtcagacaaaacggtgacaaagccgttttggcctatacaaaaacatttgacggcatcagcctgaaccaaatggccgtgagcgcagaggaaatcaccgaggcataccgtctgcttgatgatcagctgctaaaagtgatcagacaggcgattgcaaatattaaagaatatcacgaacgccagctgcaatcttcttggttttaccatcgcaaagacggcacgatgctcgggcagaaaataacgacgctcgattccgcgggcgtatatgtgccgggcgggacggccgcttatccgtcttccgttttaatgaatgtcatccccgctctcgctgcgggagtggaacggatcgttctcgtcagtcctccgggaaaagacggccgcctttcaccgggcgttctggcggcgtcgtctgagctgggcataaaggaaatttacaaagcgggaggcgcgcaggcgattgccgcgctcgcttacggaactgaaacgatacagcctgttgataagatcacgggccccggaaatatatttgtggcgctcgcaaagcgcgaagtcttcggcgttgtggatattgacatgattgccggccccagtgaaatcgtggttctggcagacgatacggcggtgcccaaagaagtcgccgctgacctgctttcacaggccgaacacgatacgctcagctcaagcgtgcttgtcaccgattcacggaagcttgccgaagccgtatcagatgaggtgaataaacagcttcagacgctgccgcgcaaagaaatcgccgaagcgtcgatcagggatcacggccgcatttatatcgcggaatcaatggaagatgcggtggacacggtgaatgcgctggcgcccgagcatttagaaatcatgacgcattcgccggaggctttgcttggaagcatccgacacgcgggggcgattttcttaggacgatacagcgctgaaccggtcggcgattattttgccggaccgaatcacgttttgccgacaaacggaacggcgcggttttcaagcccgttgaatgtaacagattttcaaaagaaatcgagcatcatctcatacagccggaaggcatttgaaacacacgcggacagcatttccgccttcgcgagactggaagggcttgaagcgcacgcaagatcgattgaagcgagaaacggaggaatgaccgatgagaaaagcggaacgcgccagaacaacaaatgagacggatattaagctggctttcgaaatagacggagaaggaaaagccgacatcagcacggatgtgccgtttatgactcacatgcttgatttgttcacaaagcacgggcaattcgatttaactgttgacgcaaaaggcgatacggagatagatgatcaccatacgactgaagatatcggcatctgtttagggcaggcttttttggaggcgctcggtgataaaaaagggatcaaacgatacggatcagcgctagtaccgatggacgaagcgctcgcccaagtcgccgtagatctgagcaaccggccgcaccttgagatgcgcgctgcatttccgcaagcgaaagtcggaacgtttgataccgagctggtacatgaattcctatggaaactggcgctggaagcgagaatgaatctgcacgtcatcgttcattacggcacgaatactcatcatatgatagaagccgtgtttaaggcgcttggcagagcgcttgatgaagcgtcatccattgatccgcgcgtcaagggtgtaccgtctacgaaaggaatgctgtaaatgatcggtgtaattgattacggtatgggcaatttattcagcgtatcgaaggcgcttgaacgcgtcggcgtcccgtatgtcgtatcagaccggccggaagagcttgaaaaagcggatgcttttattcttcccggtgtcggatcattcagtgatgccatggacaatttacgcagcacaaagcttgatcaattcatacaccgtatggttgacgagggtaagctgctcctcggcatctgcctcggcatgcagctcattttcgaggaaagcaccgaaaacggctctgcaaaaggacttggtttattagccggaaaagctgtgagactcaaagacagagatgccgaaggaaacaagctgaaggtgccgcatatgggctggaaccggctgacgtttcaccaaacgtctcctttgctttcggaagcggaagaaggcttcgtttactttgtccattcctattatatagacgggatggaagacggcgatcttctggcaagcgctgagtacggcgttcgtgttccggcggtcgtcgggaaacgcaatgtcttcggtgcacagtttcacccggaaaaaagcggtacggccggaatggcgattttaacgcaatttacaaaaatggcagcggaacagaaggtgaagaaatgaacgcttttacattatatccggcaatcgatatgagaaacggcaaatgcgtccgccttatccaaggcgattacggtaaggaaacgatatacggtgactctcctttagacatggcggcgcaatttgcacaagaaggtgccgagtggattcatctcgtggaccttgacggcgcaaaagcaggcaggaaagtaaacgacaggcatgttcttgacattgcgcggcagcttgatgtcaaagtcgagatcggcggcgggatccgttctgaagcggatgtgtacggttatttatcacaaggcgttgatcgtgtcattctcggcagctcggccgtatccgatccggcatttgtgaagagcatgctgaaacaatacggcggcaaaatcgcgatcggccttgatgcaagaaacggatatgtctggacggaaggctggctggaaacatcctcggtaagggcggccgatctgggccgtgaattggcggccgaaggagcggaaacattcattttcacggatattgcaactgacggcatgctgtcaggaccgaacatcgaaagcaccgttcagctcgcaaaagcaacgggaaaaaccgtcatcgcttcaggcggagtcagctcagtcgccgacctcaaagcactggcccgcttcaaagacgccggcgtatcgggagtgattatcggaaaagcgctgtatacaaaacaatttacattggctgaagcgctcagcggggtgaaggacgtatgatcacgaaacgaatcattccgtgtctcgatgtgaaagaaggacgcgtcgtcaagggcattcaatttcttgggctgaaagatgcgggcgatcctgtcgagctggccgaagcctacgacagggagggcgctgacgaacttgtttttctcgacatttccgcctctcacgaaggccgcaagacgatgacagacgtcgtagaacaggttgcggcaaaactggcgattccgtttacggtcggcggcggaattaatcaattaagcgatatgaaacgaatgcttcgcgccggcgctgataaagtatccgttaatacagcggccgtcctccgccccgagctgattacggaaggagcggattttttcggctcacaatgcatcgtagcggcgattgacgcaaagtatgacgaagattcggattgctataaagtgtacactcacggcggcagaaagaaaaccgagtgggaagtcacggcctgggcaaaagaagccgtcagccggggagcgggtgaaatcctgctgacaagcatggacgcagacggtgagaaaacaggctttaatcatacgctcacacagcttgtcacacgtgccgtcccggtgcccgtcattgcgtcagggggagccggcagcgcgcgccatatgcttgaagccttcacgatcggtgaagcggacgccgcgcttgcagcttccattttccattacaaagagacatctataaaagaagtgaaagattatatgaagaaacacggggtgaatgtgagatgaaacgggcagatgaactgcggtttgacgaggccggactgattcccgccatcgtacaggatgcggcaagcaaagaagtgctgacactggcttatatgaatcgtgaatcctacgaaaaaacgatagaaacgaaagaaacctggttttacagccgttcacggcaggagctgtggcataaaggagcgacgtcggggaatacccaaaaggtgaaagcaatccgttatgactgcgatcaagatgccctcatcgtgcttgcggagccctcaggacccgcctgccataagggaagttacagctgcttttctccggaaaaagcggacgcgcatgatcgtttcggcatcttaaacgaactggaaagcgtaatcgccaaacggcaggcggagatgcctgacggagcctacacaacgtacctgtttcgggaaggcgtcgataaaatcctcaaaaaagtcggcgaagaagccgcagaggttattatcgccgcgaaaaaccgcgaccatgaagaattaaaatgggaagcggcggatttgctgtatcatttgctcgttcttctgcgtgagcagtcgcttcctttggacgacgtgcttgacgtccttgcgaaacgccattcagcatctgagtaaaacaaacctcacggagagatccgtgaggtttttaatctgtcaaacttaaacattcaattaaatattccttatttccgcaaccggaggcagatgaatttgataatattgactaatagagtttattttggtttttatcaaaaatatacgttttgttcatattccgttcatgcacatccgttatagtataaacagtgatataggaggaaaacatatgccgaataaacaaccaaaacctaaagggaaattcagttcattcttttcattagtcaaaaaaacaaaaccatcatacggtatgctggccttcgcgctgtctctcagtattgtgacaacgctcgtcagcctgctgattccgctcttgacaaagcagctcgttgacggcttttccatgtcgtcgctgtcaggcgtgcaaataggaatcatcgcagccgtgtttatcgtacaggccgcattaagcgcctacgccacctacgccctgaactacagcggccagaaaattatctctggcctgcgtgatttgttgtggcagaaattaattaaactgcccgtctcttattttgacaaaaacgccacgggagaaacgatcagccgtgtcaccaatgacacaatggtggtaaaagagctgatcacaaacaatatcagcggatttattaccggaatcatttccgttatcgagtcactgacgatcttatttttcatgaactggaagctcacattgctcgtgctgatcgtcgtgccgctggctgcggtgattttagtgccgatcggccggaaaatgtttaaaatttctcgggaaacacaggatgaaacggcgaaattcaccggattattaaaccatattctcccggaaatcaggcttgtaaaagcgtcaaacgctgaagaagcggaatacggacgcggaaaagcaggcatcatggcgctctttaaactcgggctgcgtgaagcgaaggtgcagtcgctcgtaggcccgcttattacacttgtattaatggcggcgctggtcgctgtcatcgggtacggcgggatgcaggtgtcatccggtgaattgacagccggcgcactcgttgcctttatcctgtatttgtttcagatcattatgccgatgggccagatcacttcatttttcacacagcttcaaaaatccatcggcgcaacggaacggatgattcatattcttgcagaaaaagaagaagatatccaaaccggaaaagccattgaaaacgcagatcagccgattaagcttgaacaagtctcattcggctacaaaacagatcaaaccatcttaaaagacattacggctacgattgaggccggcaaagtcaccgcgattgtcggaccgagcggcggcggaaaaacaacgttatttaagctgcttgaacgattctacaatccgactgcgggcagcatcctgctcggaaatgaaccgattgatgcgtattcccttgagtcatggcgggaacatatcggctacgtgtcgcaagaaagcccgttaatgtcaggcaccatccgcgacaatatctgctacggattaaaacgcgaagtgaccgatgaggaactgaggcaagcggccgacatggcctacgccctgcaatttattgaagacttaccgaagaaatttgaaaccgaggtcggtgagcggggaattatgctgtcaggcggacagcgccagcgtatcgctattgcccgagcgctccttcgcaacccgagcattctgatgcttgatgaagcgacatcaagtctggacagccaatctgaaaaatgggtgcagcaggcgctcgaagtcttaatgaaagggcgcaccacgattgtgattgcccaccgtttatccacggttgtggatgcagatcagcttctctttgtcgaacagggtgaaatcaccggacggggcacacaccatgaattaatggcatcccattcgctgtaccgcgattttgcagagcagcagctgaagctgaatgccgacttagaaaacaaagctgtgtaaagcaagactttatgaataaaaagcagctgaaaaagctgctttttattttgcagccggagtcctgttcatacgggtgtacggtcggtaacgatgaagagttaagccataagtgtgtatgccggtacagaaggtaatgaaaaaataagacggcttataaacatcatgtcgattcatgaaaagaaaaaagcagaaggagggattttcatggctgtcatattggttgcggatgatgaccgccatatccgtgagcttgtccgccttatgatggagcagagcggttttgacgtcgcagaagtggaagacggggaagcggcggtgcggctgatcgaatcagcacctatagacctcatcatactggatgtgatgatgccgaaaatggacgggtttgaagtcagtgaagccgtccgcagctttacggacattccgattttgatgctgacggcaaaaggcgaaacgctggacaaagtgcaaggttttacttccggagcggatgattatctcgtcaaaccgtttgagccgcttgagctggaagcaagggtcaaagcattgctgaaacggtaccggatcaccgctgaaaaactgctgaccatcggaacggtcacattagataagcaatcccgcaccgtaacgcgcggcggcggagcgggattgacactgccccggcgtgaatttgagcttttatttaagctcgccggttatccgaataagacgttttcaagagaacaattaatagaagatatttggggctttgattatgaaggtgacgagcggaccgttgatgtgcatgttaaaaggctgagagaacggtttccggaaaaagactatccgtttgccatccatacggtgcgggggctcgggtaccggtttgtggtgacagaatgaaacggatcttcagaacggctggaaaaatcatcatccttctcaccgtcaccgcattcttatggctggcggctcacctgattgttcagggattcggtctcatatggccgattttgcttgtgccgtacgccgagcagattctgacgctttggcttgttttcggcctgctgtttgtaacgatgtttattttttcaaagtcagcacgtgaaaggcatcatgcgatctgggattcgctcaccgccacgatcaagcaaatgtcgagcggcaacttcacagcggccgcttcccggaaaatggagaagattgagcggaaccaccccgtgacgaaattggctgatgaactgtcgacactcgccgcggaactgagtgaaatggaaaaattgaaacaagaatttatttcgaacgtttcccatgaaatccaaaccccgctcacttcattaaagggctacgcacatcttctgaaaaaaccggatttatcatatgaggagcgggggcgctacttacacatcatcgagacagaaacagaacgattatcaaaaatcagtgaaaatctgctgaagctcactgcgctcgaacgccaaaccgaaccgatacaaaaaaaaccgttccgcattgacaaacagctgcggcgcaccatattgacctgtgagcctgagtggtccgccaaacagattgagtttctcattgatttacaggagtcgtatgtgtacggagatgaagcattgctcagccaagtatggatgaatctgattcacaatgccgtgaaatttaccggtgaaggcggccgcatatccgttaaaattgcagatctgccgggagcggcggctgtcgaaatcgccgacgacggaatcggaatggagcctgaacaggcggagcgtgtatttgaacggttttataaagcggacaaggcgagaagcgcagggggaagcgggctcggtctgtccatcgcccaaaaaatcgcagagctgcacggcggttcgatagaggttgagagcaagcgcggcgaaggaacccttttccgtgtcattcttccagccgagcctcgtgaaaaaaacagctaaaatctggtcgaaccagccagtaaaaaacgaagccgatcctgtcttttgaactattgaggtgaaaccgttttatggtatactactgacggtaatacgtataaaacggaggatatttgtgggaaaacacacttctgaacagaaaaagcacgcgcaaattgtccagctgcttcaggatggacaatatttttttcataaaggcttaaaagcatataaagagcggaatttaaagcgggccagcaaactgattcagcgggccgtccacctcgagccgaatgattccgaaatgctgtcccggctggccgtcatttattctgaaatgggccactaccagcagtcaaatgagctgttcgactttattttggtgaacctgaaagaagaaatgcccgagtgtcattactttaaagcgaataatttcgcgcatttgggactctttcaggaagcatacaaagaagcagcggcttattcagatgccgatccggacggggaattcagcgaagagattgaaaatctgatggagcttttggatttcggtgaagcgggtgaagacgaatcgctctatgaccaggatgagctgctgatcaggcaggaccgggcaaaaacgcttcttgagagcggccagcttcatgaagcggttgtcatgcttgaagagattacggccgattaccccgagctttggtctgcatacaacaacctggcgctcgcttacttttactcaggcaatgtcacaaaagcgaaacagacggtattcgaagtgcttgagaaaaatgaaggcaatctccatgccctgtgcaacctccttgtattctgctattacgagagggaagatgaaaaagtcggagaattgagcggaaaactcgccaatgtgtatccgattttattcgaacagcgctataagctgggagcgacgctagcgcttgtcggcagacatgatctcggttataaatggctccgttctctttacaaaagcgggttcgaaggcgacgacacgttttattactggcttgccgcctcagcctacgggacaggccgcacagaatttgcggaaaccatttggaaaaaggccgaagccgaatttcccgaatcagaccggcccgcgccttgggcggagcggcaggaaccgctgcctgcttcacttgaacagcggcttgccgcctattatatcagcagcgctgaaggagagcgggaccagcttgaaaaagttctgacggcaaaacgcgccgtttcaccgtttgaacaagatttcgtcaggctgctgctttccggtgaaaaaggcgcttcaggcgtctccggtgatgcggtgttcacgtatcggacggtcaagcttctggagaaagcggaagccgacagtttaaaaactgacgtcatgagctgctgggtttttcacgtcattcagcacatccgcgccgccgctgccgtacagaatgagcgggcatgggcagcagccatcgcatatgtatggaaagaagcaaacggcgaaaaaacgacgaaaaaagaaacggccgccgtttacggtataacgccggcaaccctttcgaaatacatcagacaaatagatgatattttagaataaaaccgattctttctatataaagagtcggttctttttttatcagaaaggggcaaaacagaactttaccgccgaaaaaagagatattcatacgtatttttttgcttttcgaatcgaaatcaggccgtaatcaccgtttattttgcaaaatatgagatttgcaatcacattgaaatataactgtaataaaaattgtcgaaacatgatggtataatgagtctcgtacataagagattagtttattttacatgtgctgtataatctataccaattaaccagatttaaagaatcatacataaaaatcatcagcctcacgggtttgtgagggagcgtaactttgatgttcataatagaattccaaatgagaacaggtttaaagtaaaagggaggaaagaaaaagtgaaaaagagtttattaacacttggtttggcttccgtcatcgggacaagcagttttttgatcccgtttacaaaaactgcatcggcggaaacattagacagcaaaaaagcaaaaattgaaagcaagcaatctgaggtggcttcaagccttgaagcaaaagaaagagaattgtctaagcttcaggacaagcaggctaagattgaaaaagaactgaaagacattaacgctaaagcgttggatacaagcaataaaatcgaagataaaaaagctgaaaacgaaaaaacgaaaaagcaaattgctgatttgaaaaaagaaatcaaagaaacagaagcgcgtattgaaaaacgcaatgaaatcctgaaaaaacgcgttcgttctttacaggaaaacggcggttctcaaggatacatagatgttcttttaggggcgacaagcttcggagacttcatttcccgtgcgactgcggtatcttctatcgttgatgcggataaagagctgatcaaacagcaggagcaggataaagcgaaactcgaagacgcagaagctgaacttaacgtgaagctgaaaaaagttcaagatgatcttgcgaaactcgagtctatgcaaaaagacctgaacaaacagcttgatcagaaagacaagcttttcgacgaagcgaaaaacggccagaaaaaagcggcttccgctatctctgatctgaaaaaagaagcatcaaagcttgcaaacgaaaaagctgacactgaaaaagaacagaagcgcattaaagctgagcaggctgcagcggctgccctgatcaaaaaacaggaagaagcgcaaaaagcttctgaagaccaaaaccaaaaagatgacagccagccggcaccggcggttaaaactgtgaaaaaagcggctgtttcaacatcatctgattcatctgacagctcaagcaaaccgaagagcacttcaggcggatcatctcataacagcggcggttcggatgattctgacggcggatctgttatttcaaattcaggcggtattgaaggcgccatcagcgtaggatcaagccttgtgggtcaatccccgtacaaattcggcggcggacgcactcaatctgatattaacaaccgtatttttgactgctcttcattcgtacgctgggcttatgctaacgcaggcgttaacctcggacctgcaagcggcacaaacacagatacattaatcggaagaggtaaagcagtaagcgcgtctgacatgaaacgcggagacttagtattcttcaatacgtataaaacaaacggccacgtcggcatctacttaggtaacggaacgttcctgaacgataatacatcacacggtgtatccattgattctatgagcaacccttactggaagaaagcattcaacggcaatgtaagacgtgtcgtgcaataatgaataagacaagggccttctatcccggaaggctctttctttatttgtatacccgctcaggagccgactaatcacggtttttcagaaaaatgagcaaaaaaatagcgaattgccctcagatttaataggatatgggtaaggaatacgattgatggggattcttagtcatatagggtgcgccccatttcgaaaaggagtgaatcatggtgtcagaagaaaaaatttatgatgtgatcattatcggcgcgggtccggcggggatgaccgctgctgtttacacatcacgagcgaacttatccacattaatgatcgaaagaggaattccgggcggccagatggccaacacggaggatgttgaaaactatccgggttttgaaagcattctcggccctgaactttctaataaaatgtttgaacatgcgaaaaaattcggtgcggaatatgcgtacggcgatatcaaagaaatcgttgacggcaaagaatataaaacggtcaaagccggttcaaaagaatataaagcgcgcgccatcgtcatttctgccggagcggaatacaaaaagatcggcgttcccggcgaaaaagaactgggcggccgcggcgtatcgtactgcgcggtttgtgacggcgcgttctttaaaaataaagagcttgtcgttgtcggcggcggagactccgccgttgaagaaggcgtctatctgacacgcttcgcttcaaaagtcaccatcgttcacagacgtgacaaattgcgtgcgcaaagcattcttcaggcgcgtgcctttgacaatgagaaaattgacttcaaatggaacaaaaccgtaaaagaaatccatgaggaaaacggaaaagtcggcagacttactcttgtggacaccgtgacgggagaagaagaagaattcaaagctgacggcgtctttatttatatcggtatgcttccgctttctaaaccgttcgagaacttgggcatcacaaatgaagaaggctacattgaaacaaacgctcaaatggagacaaaagttccaggcattttcgccgcgggagacatccgtgaaaaaacgctccgccagatcgtaacggcgacaggcgacggaagtattgcggctcaaagcgttcagcattatgtggaagagcttgaggaaacgctcaaaaccgttaaataatcactgtaatgttcagtttttgaatcgttactgtgttttaattacgctgtaacacgggtgaaatactgatgttttaagatgaatgtagtaattgaccccctttttaatgaatacactttggcacggattccagtatccgtgccctttttttgcgattttctgttttctgtcaaataaaagaaaaggatgtcggtgtctctgcattgtgagagacatgccgaaacggtataatgaagagacgatgatttgttgagaaggttaggtgacgtacttgtgcaaagagtgacaaattgtgtgctgcagacagatgatcaggttctccttctccaaaagccgagacggggctggtgggtcgcgcccggcgggaagatggaaagcggcgaatccgtcagagattccgtcatcagagagtacagagaagagacgggcatttatatactaaatccgcagttaaaaggcgtgtttacctttattattaaggaacaggaacaaatcgtgtcagagtggatgatgtttactttcgtcgccgactcctacacggggcggaatgtcgctgaatcagaggaaggcgttctgaagtggcatgacgtaaaagatatccacagccttccgatggcccccggagacgggcatatccttgattttatgatcaagggccaagggcttttgcacggcacctttacgtatacgccggacttcgagctgctcagctatcgtttagatccgcagtttattaaataaaagaaagaccgcaggggggagaaagatgagtatgaatgaaaaccatgatattcagctcgtcatcattacgggaatgtctggagcggggaaaaccgtcgccattcaaagctttgaggatctcggctatttttgcgtcgataatcttccgccttccttgctgccgaaatttttggagttgatgaaagaatcaagttcaaaaatgagcaaggtcgcgcttgtcatggatctgcggggacgtgaattttttgacaggctgattgaggcgctggatgaaatggcggaaaatccgtggattacaccgcgcattctctttttagacgctaaggattccatccttgtgacgagatacaaagaaacgaggcgttctcacccgctggccgctaccgggcttcctctcgaaggaatcgcgctggaacgccagctgcttgaagaattgaaagggcgctctcagctgatctatgacacatcggatatgaaaccgcgtgatctgcgtgaaaaaatcgtggcgcatttcgccacgaaccaaggtgaaacatttacagtgaacgtaatgtcattcgggttcaaatacgggcttccgatagatgccgacctcgtgtttgatgtaaggtttctgccgaatccgttctacattgaaagcatgaggccgcttacggggaaagatgaggaagtgtcatcctatgtgatgaagtggaacgaaacacaaaagtttattgaaaagcttgttgatctgctcggctttatgcttccgtcttataagcgggaaggtaaaagccagcttgtcatcgcgatcggctgtacgggcggccagcaccgctccgtcacgctcgctgagtacttggctgactattttaaaaaagattactatactcatgtcactcaccgggacattgaaaagagaagccggaaatgaataagaagccgaaaatcgcaatcttcggcggcggaacgggtctgtccgtgctgcttcgggggttaaagcataagcccgttgatattacggcgattgtgacagttgctgatgacggcggaagttcaggccgtctgcgggatgaacttcaaattccgccgccgggtgacattcgtaacgtactggccgctttgtcagatgttgagccgctcgttgaaaatctgtttcagcaccgtttcaacaaaggaagcgacttaaccggacattcgctcggcaatttgattttggcagcgatgacaaatataaccggtgatttctttcacgctgtcaccgaaatgagcaaggtgctgaatgtccgcggcagagtgctgccggctgccaacaccagtgtcgttcttcacgctgaaatggaggacgggcaggtcgtctccggagaatcgacaatcccttcttacggccagcggattaaacgggtgtttcttacgcctgaaaaaattgatccgctcccggaaacgattgacgtcatccgtcaggccgatttaatcattatcggtccgggaagcctgtacacaagcattcttccgaatctgctcgtaccgaaaatcggagaggaagtcgtcaaggctgcggccaaaaaagtatatatatgcaacgttatgacacagcccggagagacgctgcaatacagtgcggccgaccatgtcaaggcgctgaacgatcatatggagcagccgtttatcgacacgatcttaatcaacaatgaggagatccctgacgaaatcaaaagcaaatatgcgaaagagctggcccggcccgtcgacttcaatgttgaaaagctgaaatccatggggcttgaggtcatcagggatcagattatcacgtataaaaatggcgtaatccgtcacgatacacataaagtggcttctcttcttgtcgatttattaagggactagaggccttttgaaatgaggtggctaatatgtcatttgcatcggaaacaaaaaaagaactgacgaatctggaagtgaaggactgctgcgccaaggcggagctgtccgcgctgattcggatgaacggttccctgtcattttcaaaccgccatctcgtgcttgacgttcaaaccgaaaatgcggcgattgcccgccgcatttatacattgctgaagaaacaatatgatgtatcggtcgaactgttagtcagaaaaaaaatgcggctgaaaaaaaacaatgtttatattgtgcgattttctgaaaatgcaaagctgattttagaggaattgaaaatcctcggagagaactttgtatttgaacggaatatttctgaggaactggtggcgaaacggtgctgcaaacgttcttatatgagaggggcgtttttggcggggggatctgtgaataatcccgaaacatcgtcgtaccatttggaaatcttctcgctttataaggaacataacgattcattatgcgcgctgctgaatgaatttcatctgaacagcaaaacgcttgaacggaaaaaaggctatattacgtatttaaaagaggcggaaaaaatcactgaatttctgaatgtcatcggcgctcacaattcactgctgcgttttgaagatgtgcggattgtcagagatatgagaaactcagtgaaccgcctcgtcaattgtgaaacagcaaacttaaacaaaaccatcggggcttcgctcagacaggtggaaaatattaaatacattgatgaacggatcggtcttgaagcgctgccggaaaagcttcgcgaaattgcgcagctgcggattgattatcaggaggtcacgctgaaagaactgggggaaatggttgcaagcgggaaaatcagcaaatccggcatcaatcacaggctgagaaagctcgatgaaatcgcagaacagctgcgtacaggacaaagcatcactttgaaataaccgtacagaaaaggggagatcttatggttcaggggaaagtggaagtgcgtttaaagacgggattgcaggcgcgccccgctgcattgtttgtacaggaggcaaatcgctttgcatcagatgtgtttcttgagaaaaacggcaagaaagtgaatgccaaaagtattatgggattaatgagcctggcggtcagcacggggacggaagtcactctgatcgctgaaggcgatgatgaaaaggaagcgctggaaaagttgtccgcttatgtgcaggaagaagtgtaaacactttgtaagggggacggaacgatgaatgagtttctgaaagattgttatcaaacgataggctgggaaaaggattccctcgatttcagcaacctgccggagtttttaaaggcgctcgcgtatcggtttccgtttgaaaatcgcgctgttttgtccaaaaaagaatatgacgtcacgaaagaaggactgtggcggcacatggtgaaggaacctcatggcggcctttgctatgacttgaacggactgctttatttcatcctgaaagatgccggatttgatgtcaaattgatccgcggaacggtctggaaaaacggctgggcgctgcccgacacacatgcggccgtacttctttccgccggagggaatgagtacatcgctgatgcaggcttcggcctcaatctcgccatgcagcctgtgccgatgtcgggagacgagacggtatcagcggccggagcgttccgcgtgaaaatagaagagacggaattcgggacatacctgcttgaaatgaacaaaggggacggctggcagactggttacgcattttcgcttgaagaaatcgatgaaaaggacctcaagtctatgaaacaaacaatctttgaacatgaacgctctcctttcaacaaacgcctgcttgcttctaagcggacaccggaaggccacatggttctgtctgaacgcaatataacaataaaaaaacacgatggcacggcggaaaacagcagaatagaccggtcagagtttgaagaaaaatttactgctcattttatatgaagctcgcaggttctctgcaaaaaaaacggcctccgcagggaagccgttttttgtatgtgtttatctcatttttgtaaaggttttataatgatctgtcgtcttataaatcagccagtcgcttgagtaaagaatccggtctgaatttctgaagcctgatgtatagttaatatccgcttcacgccacgtccgtccgcttttggcagggagtttgccttccctgtttgagaagatgtctccgccgatgcttttccccggagcgacgtctgcaagattcccctttgatgcaacccagccgagggcctgcgcttctgactttgtaatgtaattatcaggaagcttatgataggtctgaagataatccgcaaccccgtcaaacgtgttgataacctgtgcttcagtgtgcgccttgtgagaagatgtatccgtcttggcagccgtggaaaatagcatccccgccgcggagaacagcaccagcaaacaaacggaaatccacgataatcgttttttcaaagcaatacctcccatttttatcatgtgaagctgattccttttcattgtatcagcatcgagagaaaggaatagaaagaatttaaaaatagtacttttgatctagtgaaaaataaaccccggctgaacagccgggatttttcatctcattgaaattccttcgtgaggtttttcggcgtttttccgtatacggcgtcaatcatgttttgtgcggcttgcttgaacatattcaagcggatttttgccgttgctgacccgatatgcggaagcaatgtgacgttttccagctgcaggagcggattgtcttcggcgatcggctctttttcaaacacatctaaaccggcgccttttatccagccctcctgcaatgcgcggatgagcgctttctcatcaaccgtctttccccgggaaatattgacgaaatatgccgtatctttcatcaatttaaattcccgctctcccatcatatgatacgtttcgtcagtaagcggcgtaattaaaagcacaaagtctgatgttttcagcagtgtatctaagtcggcatatgtaactccgagttccttctcagcatccggttttctgctgcggttataatacagcacgtccatatcgaagccgaattttgcccgtttggcagcttgttcaccgattctgcccatgccgataattcctaatgtctgatggtggacatccataccgaaaagagattcttcctcaacggttccccatttgccggcgcggacgaatcgatccaattcggcaacccgtctggcggaagacaggattaatgaaaaagccagatcagcgacagtgtcatctaaggtgcacggcgtatgcgtgccgacaaccccgcgtcttttcatttcttcaatattaaaattatcatagccgactgaattattgctgacgaccttcagcttcggcgcgtgatccagtaaatcactgtcaatcgccgttccggatgtcagcagcccttcagcatctttcattttttcgtacagttcctcttttggaatggtatcttctttccagatgtcatagcggcaatgctcgcctatcatttgttcgacttccggcggtatcggtttcgcgatgaatacatagggtttcaacgggcttctcctcctttgtctttcttctctattttattatataagagaagcggtaacgtgagaaatattcaaacgcattacgataaatttctggttcttttgaacttaaaatgaaaggaaaagaaatgtacatgcttgatttctccaaacaataacagaatccgcctatatttctgaaggcaaaatgagcggaaccgctgttttcaaaagctttataggttggtgtaaagataaattttattatttttgaaagatataaatgaacataatctgaatttacagtcaaattatcgtgtctttttttgaaagcgcttttgaggcctttttctgtgctataattccttactgtaagctgggtaagaaggcttgcaatacaatcggatgggagatgaatagaaaaatggtttctttatcaagcattttggagcacaaccagcagtttgtccaagaaaggaaatatgaaccttaccaaacgacaaaattcccgaaaaaaaagcttgtcatcgtatcctgtatggatacaaggctgacggagcttctgccgcaggcgatgggactcagaaacggcgatgccaaaatcataaaaaacgcgggagccattgtttctcacccatttggaagtgtcatgcggagcattttggttgccgtttatgaactgcaggcagaggaagtctgcatcataggtcaccgcgagtgcggaatgtcgggattaaatgcggcttccatattaaataaagcgaaagagcgcggcgttgaggacaaatgtctcagccttctgcagcatgcgggagtcgatttggaaacatggctgaccggttttcacagcgtcgaagaaagcgtggcccacagcgtgaatatggtcaggcatcatccgctcttgcctgaagaggtgccggtgcacgggctggtgatcgatccggggacggggacgctggatgttgtcgttgacggttatgaaacagtcaaaggaggatgcagctgacgatgcaatttacgggcagatatcagggatacaatttgcagaaatttcagaaagacctaatcgcgggaattgtggtcggaattgtagcgattccattgggaatggcctttgccatcgcctcgggggtcggtccggaatacgggctttacaccgttattgtggccggaattctgatttcgctgttgggcggctctaaatatcagatcggcgggcctacgggggcgtttgttcccattttatttgccattgtgatgcagtatggttttgagaatttacttgtagccggttttatggcaggcgtcatgctcgtcctgtttggcgtatttaagctcggaaagattatgaaattcgtgccgaagccggtgatcgtcggatttacggccggaattgcggtgctgattttctcggagcagattgcccattttctcggtctgcgcgatatccaaaagcatgaaagctttatcctcaacattgcggaaatcggcaagaagctcggaacctttaattcgtacagcatcctcatcgcgggaattgctttggccattttgctgttatcagccaggctgatgccgaagattccgggcgcgcttgtggcgctgcttgtctctacagccgcggcggtcgtgttttttcctgacaaaatggcgacaatcggttctgcttacggggaaatcccgcggcagcttccggctttccagcttccggatttctcaatcgataacatgatcatgatgtttccgtcggctctgatcattgcgcttctcggcggacttgagtccatattatcggcgatggtcgcggacaatatgaaaggatcacggcatgacagcaatagggagcttgtcgggcagggcatcgccaatatggcagcgccgcttttcggcggcataccggcaacgggagcgattgcgcggaccgcaacaaatattaaaaacggcgcagtttctccgatttccggtgttgtccacggagtcaccgtcctcctcgtcctgctcgtcttcgccccgcttgccgttcacgtaccgctggcaagcatggcgccggtattaatggttgtggcttggaacatgagtgagcggagggaagtcgccaatatgatgcggctaaaaaacactgattcattcgtactggcggcaacctttttactgacggttctgtttgatttaatcatcggcgtttctgccggtctcgtgctcgcttttgttttctttatcagaaaaatgagcgaatcaacaagcatcaaaacaccgcatgccgctgtcaaatcggttaaaaatgattcatccgtcagcacatattccattgaagggccgctgtttttcggttcaattgattcactggaatcatcgctgctggagaggcttcaggaaaagccgaagacgcttattctgctgatgaataatgtgcattacatggatacctccgcagaagcggtgctggggaatgtgatgaaccggatcaaacggcataacgggagattgatgatcgtcggattgcaatcacagccgagagagctgatccggaagacggggctgtttcataaaatcgggaaacagcatttctttgagcatcaggacgagataacaggataaattcagatacggcctgtccatgaaaaagcggacaggccgtgtttttattcggtttcaaagcgcttgatcagtttttcctgatgggctttcatcgcatcttctaacgtgattccgtacttatcggcaaggatagccagatttccgaggacgtcacccatttcttcaatcagctcctgcctgcgttcagcctgggtcgcgtccttttcatccggccggtctctgccgatttcatatgctcttaccgcccgggcgagctcacccgcctcttccattaaaaagccgattctgataaatggtccgtacgccgtccatcctcgtttttcataaaaatctttcgtccattgttctgcttcagccatctgcatgtgaaacactccttatgtcctgtatgattcttattgatattatcatatagagatgggacaatatatagtgtattttgatttattgatgtacatatatagatacggagatgaaaaaatgaaaaccatttgtgtatttgcggggtcaaacccgggggtaaatgaagagtacaaacgcaaagcggccgaactgggtgaatatatggcggagcagggaatcggccttgtttacggcggctcacgggtcggtctgatgggaaccgtcgcggatgcgttaatggcaggcggcggaaaagctgtcggcgtcatgccgagcgggctgttcagcggagaggttgttcatcagaatctgacggagctgattgaagtcagcggcatgcatgagcggaaagcgaaaatgagtgaacttgccgacgggtacattgccatgcccggcggcttcggaacatatgaagagttatttgaagtgctatgctgggcgcaaatcggcattcatcaaaaaccgatcggactgtacaatgtgaacgggtattttgagccaatgatgaagatggtcaagtacagcattcaggaaggattttcgaatgagtctcatttaaaactgatacacagttcctctcggccggatgaactgattgagcagatgaatcggtatacatacccgattttagataagaaatggcgggaattgtaaggcagaggtctgaaatatgtttcggcggttgcatctaatccattctgacggaaaattctccgcctatagaataccttttctttctggaaatcgtttgataaagaaaatgctgctgggattgaaagaagaacatccatttcctcagaggagatggatgttttgcggtttgcagactgtatgcgtttacaacttttgttgcacgaatgtttcctccgatatgaaatcatcctgctgcatcttttgtttttttgaaccgattccaaatataccgactgtcagtgcacaaagaaaccagcagcctgtaaagaacaagaaaacacttaaaaatccgtagcctgaatacaggaaactgacgacaaagggaccggctacatttgcaagacgtcctacgccgtaagtgaggccatttccagatgccctggcttcaaccggatataattccggcgtataagcatatgcgatcgaactgaacgtgcgctcaaacatatgcatgagaaatccgcatatgacaatgaccatcggcaaaggattgatgccgtaaaagaatccaagcgccataataattaaagataaaacagaaatggcccactttcgatccacacggtcagagatttgcgacgcaatgagagcgcccagcggggcaccgatcgttcccagagtgacgtatacgatagactcatccattgatacgccttcttttaccaaaagggtgggaacccacgtgccaaagccttgaattgcaatcgtggaagctgcccacatcgtcattaaaacaaaagttcttcctgccaaaggcttttgaaataacgtccgatatggaacagattttacagcggtttgtctgcttcgcagagccggagctggttcaggcagttcacccttttctttttctgcttttgcctccagttcaagcagaatgcggtgtgcttgttcgctttttcctttcgtgtccagccatttcggtgattcttccagttttctggcgatcagcggaaaaaaaataccgaccgcgccgaatagaaagataaaccgccagccgtaagaggcggacggcacgaccaatttagccgcccagccggctgcaggaattccgcatatgccgattgtaatacagattgcctggtatttacccttagttgcggatgggaaaaattcgctgatatacgtacttgccacaatcgttgtggcgccgatacctaaactcgtaagaaatctaaaaacaccgagtatttctgggttccaagccagagaagagaggagggagaaggaagagaaaaaggtgacaaccagaattaaaccttttttccttccgaaacggtctgaaaaccatcctccggcagaggcgccgataaacatcccgaaataggagacagacgtaataaaagcgatggtatgagtggatatgttccattcctttaaaagtgaaggcgccgcatatgaaaacgtatttaaatcgataaaatcaaaaaagtaagcgaatgaaaggataacgagcactgcttgatgggcccttgaaaaaggcagtctgtttaatcgattagacgcatttacattgatcatctcgtattcctccgtttatctttgacttgtctgaagatggtattaaccaatgtgattcagcgtattcaggttgtaactttgctttgtaaacacatagccttcagagatttttcttgctgtgcgtactactttaatcgttgttccatccggatcaacctctgcctcggtttctaaaatgccgcttggatgtcccaatcgaatcgttctcccatagaatgaaaattcagataatattgtatcctgcaatagcatgccggcagtcgtacaaaccgcccctgtaatggctaaagcttgatgcggtttttgcatggacatcatacgaatgacaagatccatctcttctgcgtgtctctttattccttttgtatcgatataatccgctggagatgagattaatgttagttttggtacggccggtgattttgcagcagcctcatgtctcggagcgaatctgcatttctcggctgcaatcgatcggatcatttcgagcttttccaatatatccggggtatattcatccggaagttctaagccggtaagccccgtgtcctctgcttttacaaagacaagcggattggcgtaatcaataatcgagaccgagatatttccatacggtgtatcgagaacatcaataggctgaccagtgggaaacagcttgccggtcaccgctccttcagcctggtgaaatgaaagataaataggagaagctgtacctggaaccccggggatagcgcagtccccctggtaatgaaatgttccatttctgacttcaacttctgctacgatcactttttgagtgtttgtatttaacattctgacttttgtaaccggctcttcagcttgaacgagtcctttctcaatagcataagggcctacggcagaagagatatttccgcaattgcctttgaagtcggtaaaacggtcagtcaaactgacctgagcaaacgtatactcaacatctgcatcctttctggcggatttcttaataatggctgccttgcttgtgagagaatggccgccgccgagaccgtcaatttgtctctcatcagggctccccataatgtctaaaagaaaatcgctccataggtttgtatcgtctggcatgtctttttgatgaataaaaacgcctttgctggtgccgcctctcataacggttacaggaactttttccatgctgtctcatccttacatcattttgtgtggataaaaaggtaccggtccctttggaaaatatcgtatgataaataaggattataagtaaaacatataatttttataaagttgaataaaaaacttttataataggtgaaaattttatagcagaaaaatattttgggggatttcatatggatgaaaaggattggattgtgctcattacattattcgaagaaaaaaatatgacgaaggcggcagagcgattatatatgacacagccggcgttaagttatcggctcaaaaacctggaagcacaattcggagtgcgccttttttataaaagaaaaaaagggatggagttcacttcagaaggtgaacatctggttgattattcgaaagaaatgctgcaggaattcagaagagtgaaggatgatatgctcaatatgagccatgaagtcagcggggttctcagattaggagtctcaagcaattttgctcagtataagctcccggcgattctaaaacggttttctgatcagtatccgtctgttcaattccacgtcaatacgggatggagtgcgaaggtgatggatctgcttcatcattcgggggtacaccttgggattatgaggggaaattatgattggcaaggggaaaaacaactgctaaatgaagagcggctgtaccttatttcaaaaactgaaatcaacagtgaggaccttcccaaattgccgatgatttattatcaaactgatgcttctttgaaaagtttgattcaaaaatggtggaataaccaatttactgaaccgcctttcattgcgatggaggtagacaggcaggaaacctgtaaagagatggtgaaaaacggtctcggttattctgttgtgccggaaatctgtcttcagccttctgatgaattatacacattggcgctatcttataaaaataacgagcctgtgatacgcgatacttggcttatgtatgattcttcagcgttagaattatctgtcgtcaaagcattcattacttttttgaatgggaataaagcataaaaaaacctgcaagagacatcagctcttgcaggttttttgggcattacttctggtcttctgtattgcgtgtcagcactttatcgattaagccgtattctaaggcttcatcagctgatttgaagttgtcgcggtctgtatctcgctcaatgacttcaagcggctggccggtacgttcagcaagcactttgtttaatttgtcgcgaagcaagagaatgcgttttgccgcgatttcaatttctgtcgcctgtccttgcgctccgccaagcggctggtgaatcataacttcactgttaggaagcgcgtaacgtttgcctttttctccggctgcaagtaaaaatgctcccatagaagcggccataccgatgcagatcgtggatactttcggtttaatgaactgcattgtatcatagattgccataccggcagtgattgatccgccagggctgttaatgtaaatggaaatatctttttcagggtcttccgcttcaaggaataaaagctgtgacacgatggagttcgcaacgttgtcatcaatcgcagatccaagcatgataatacggtccttcaaaagacgggagtaaatgtcataagctctttctccgcggttcgtttgttcaatgactgtaggtattaaattcataatgctcctccttcaccttttaggtaagtatgtatttacatgatacatttttggtcaataaaggtcaaacaaaacgctgaccaaaatgccaaccttttcttctaacaccatttttcccataaaacaaaaagttcaaacagcaaagtggaaatgaggatgatcagcgccggcgcttgagaaaatgatatggcgggagcgctcaaaatagaccgcaatcgcgtcggtacgtactgaagggtctgactacgttgtccgcccttccaaaagctgtaccggcaaatacgtttccagcggcaaatcatcaaattcgccttcaatttcttttgctaaaatctcgatggctgttttggaaatcaattcaatcggctgctggatggttgccaagtccggcagaaccgattgaacggtttcagtgccgtcataaccgatcacttttaattgattcgggatgtctattccccgttttttggcctcggtcatcactgcagccgccatgatatcatcgctggcaaaaattccgtcggtgtcaggctgttcatcgaataatgttgaaataatgtcatggtaatgctgataaaagggtacttcatatgtaataggcttccgtccgtgttcatgcatgacgtcttcgtatgcttttcttctgaggtttgccggtgtttcgagttcaagcgggccgttgagatggacgatgtgccggcaccctttttcaatcagcagttctgccgccttttttccgccgtcatagttgtctgagccgacgacgggaatcgtgtccgataagtaatggtcaatggcgacaatcggcagattttgcttgtgataattgagaattccacggttgtaagtcacggcgatcacgccgtccacttggtttcttatcagcatctccaaatatttttcttccttatcctttcgatgtaaactgttgcaaagcagcagtttgtagcccatggacgtacaaatgctttcaatatgaaaggcgagttcgccgaaaaacggattgctggagtttgggatgataagtcctattaaattggttcgttttcggaataaagagcgggccagatcgtttggaaagtaattgatttcttccatcgccttgtacactttttcttttgttttttcgctgatatagccgcggttatttaatacccgcgaaacggttgtggatgaaactcccgctattttcgcaacatcatgaatgttaggcttcattcccgtgccctcctgcttactgaaatggcttacaatttccgtcacgcacttattttagagaatcaggctgacatgtgcaaggacattccatgtttctgttttcatataaagagggtgtgttttgtttgattgaaataatcagaaaatttatgtcaaccgattgacatatgaaaccggttgacatacaattctttttgaaagcgctttatttgcgaagtgaagggaagtgacgggtatggagagatggctggcggcaataaagtgaaagaattaagcagcgatagaaagtaagcgcttacttagagctcgcatgtatgtgatgaaaatgaagaaggaagtatgcggctctaaaacggctattaaaaggtcctattaaaggagcggtgcaaatgaaaagctcaaaaagtctgtattggaaactgagtgcttatttcttttttttcttttttacttggtcttccagctattctttatttgcgatttggttagggcaggaaatcaatttaaacggatcagcgacaggcattatcttttctgtaaacgccgtatttgccctgtgcatgcagcctctttacggttttatctctgacaaattggggctgaagaaaaagatattgtttatgatcagctgtcttctcattttcacgggtccgttttatatcttcgtctatgggccgcttttacaatacaacgtctttcttggcgccgttgtcggcggcttatatttgggagccgcttttttggcggggataggcgcgattgaaacgtacattgaaaaggtcagccgtaaatatgatttcgagtatggaaaatcaagaatgtggggctcgctgggctgggcggcggctgcattttttgcagggcagcttttcaatatcaatcccaatatcaacttctggatcgcgtctgtttcagccgtcatattaacggccattatcatgtctgtgaaaatagaaatgaccgatcatgagaaaaacagagcggattcggtccggttaaaagatgtggggcggctctttttactaagagatttctggttttttatgatgtacattatcggggtgacttgcatttacggtgtatatgatcagcagttcccgatctattatgcgtctttgtttccttcagtgtcgacgggtaaccaagtattcggctatctgaattcattccaagtgtttttggaggccggcatgatgtttcttgcgccttttatcgtcaataagttcggggcgaaaaacagtttgattttagcggggtttttaatggctttccgcatcgtcgggtccggaattgcagttgaacctgtaggcatttcatcaatgaaactcatccacgcactggaattgccgattatgctgatcgccgtttttaaatatttggctgccaattttgatacgcgtctgtcgtccgtcctttatctcgtcggttttcaattcgcatctcaggcaggcgcgtcgattctgtcgccgcttgcgggaggattatatgacagtgcggggttccgtcaaacctatctcatcatgggaatcgtcgtcttcggttttaccgtcatctccatatttactttattgggcccgaaacaaaacagcaggcgtgtccagcgtctgcaaaaaatcggatagagaggatgttacaaatggatagaattcagcaggcggaagaagctttgaaggaagccgagggtaaagtgaaacaaagatatcgattggggtaccatattatgccccgggcgaattggatcaatgatccgaacgggcttattcaatttaaaggagaataccacgtcttttttcagcatcatccgtatgatgagcattgggggccgatgcattggggacatgtaaaaagtaaagatctcattcattgggagcacctgccggttgccttagctccgggcgatgcattcgaccaaagcggctgtttttcgggaagcgcggtcgatgatcatggaagattagccctcatctatacaggacataatataattgatcaagagaaagacctattctatcaaactcaaaatatcgctgtcagccaagatggaaccgtgtttgaaaagcttcagggaaaccccgttattgcggaaccgccggaagacagcgcccgtcatttccgcgatccgaaagtatggaagcatcgcgatgtttggtatatggtcatcggcaactcctcaaaagaaaacgtcggacgggtcgttttataccgttcacctgatttgcgtgattgggaatacgcgggggttcttgcccaaagtgacggtaatctcggctatatgtgggaatgtcctgatttctttgaattaggcggcaagcatgtcctgctgatttcgccccaggggatcgaggcggacggtgattcctatcaaaatttacatcaaaccgggtatttaatcggtgactatcatgatgaaacaaacaaatttacacacggcgcttttaaagaactggatcatggccatgacttttacgccgtgcaaacattattagatgataaaggacgcagaattgctatcggctggatggatatgtgggaatctgagatgccgaccaaagcggacggatggtgcggtgcactgacgttgccgcgagaactgactttgcgtgatgatcataaacttttgatgaatcccgtggaagaaaccaagcagctgcggaaaatagaatatcgggaatgtgccggacgatcgctttcagggagttacttggcaaagacgtccgaagacctgcttgaagtccgggtcgtgtttgatgtaaacgattctgatgccgaaacggcaggttttaagattcgcggccttgatgaagaagaacttgtgctgacatacaatctaacggataaaaagctgacgcttgattgcaccaagatggggaaagcgaaagacggtgtgagaagggtgcagacggatacaaacggcaagctggcgctgcgtatctttattgacagatcctcgattgaagtattcgccaatcatggagaaacaacgatgacaagccgtatctatccgaatgaaggcagattggggattgagctgttttctaagaaaggcgccgtaaaggttgaggaattcacctattggacgttaaaggacatttggaaaagaagctgaaacgggtgattaccgctttttctgcagtggctgaaaatgtactgagccgggggcagtccgcctgaaatgggttttttgtgaaaatcattgccgttaaacgatgcaggattatgctgcatgaggacgctgcataatcctgttgtgtattatcaaaaaagagttgctttctgtgcgtttctttattataatataaaggtatctgattgaaaaaacgtgcgctcgtagctcagttggatagagcggtggtttccggtaccacgtctgtcgggggttcgaatccctccgagcgcgtccaatacgttataacccgtcatatcaacgttttccgacggtccgttaagcgttaagtgtacgaaaagtgtccggaagggcgcgaaccggtaaagaacgggcccggctttaatcggtcggctcgcttctcctaaaacgaaatagtccgattcagcaaacgtaacctcgcggataaataaatccgggaggttttttgttatggcggttttaaaacgcaggcaaggcgtcaggaatcggcgcgagactgacggaatagaaaagagcttcaaagcggcgaaatccgttcacgaagcgttagggatcgtatgcgagctatttgaaacggagaactatcgcgacagaacgatcaatgattatcggaagtgttgggcggtatttatggaagtggccggcatacagtcgacggataacgtaacgaacattacggaagatcatctgcggtcctgtatatcaacgatgctcaacgtacgcgacctttcgccagtaacgataaatatccgtttaggcggcataaagtcgatccttagccgaatgactaagcgcgggaaaggaaagcaaaaatcatatattatacatgactaatatgtgctttccttttattcaattaaagcgtccttgtctggaataagactgatagtaagaccatcttcaaaaagtttccttcaatactcaaactgaacaaaattagttaatccaatgggaaggtcgttgtatatgagaggggaatgttgtctttacatcacctttagccgaattaatttgcatttgagttaaaaacatactcgtagataagtctgctccccttaaatcagcatcacgcaaatcagcgccaataaaatcaacacctcttaaatctgcattcctcatatctgcagcaattaaatatgctccccttaaatctaacgcccttaaatctttacctcttaactttttgccaatccaatcggctctttcgtaattataattcttggcatttttagtgtcaggtaactttgaaattaagctttcccgaatatactcgctggtttccgaaagcaatttgtttaatggaaatctgtacaccactagatcaagagataataattcttcagcatcgagttttgttaagttctgcaattcttttaactgtacactcaatttatcagacaaagcatggggaatgtcatacgacaaggcttctgccgtgtacgcaatcatttcatgtatttgttccatgatcggaaacactcggaacattttttctcgaatttcaggattatctcgccaactttgacctttaaaagtaatttgagaaacaacttgtccagaacctaaacagtcaaacactgtacagcccttaaaacctttctcttgtaagttgctgtgaatttgacaaccataatcagattgtaaattaacacaaggtgcacctgctggcttgttaattggaaaatcgcttgatgctacaatattaagcgctgtgcagcaaagtccaaagcacttcgtacaatcagccgttaaactttctctaatatttttggctgtttcattatccatttttataccctcttatctttagttaaataacttttgagtttaatatacgagattcctaaacaatcttgattgttaaataataaataccttgtcaactagaactttttgtagacttctgcatacgctacttttaattggtttctaaaatctttgttctcatgctctaggcgcttaactttccgctttaatgactcgataatcgcatctttattattttcgttcatttcatacttaacttgctttgcagaggggctttttatctcgttttaaagctattaacgaaagtttctccgtcgttctccacattaacaataagcttggcactttcactgatccgctgtgcgagagctttttgcgccttaccttcaaagctgttcaatagtgctgaatacacttcatataattcatctttcaatgtatccatttcgaatgtgggtttcagcgtttggcgcactgtttccagttttgtccccgctgcctgcgtcatggcggttttcagcatctgccgctgcagccttttcttcatcgggtcgtccttgtgttctaaaagttcgtctaatgtcggcattatgtatccacctctatcatcttaaccagtttgcgagcatctggtctttttcctgaaattcgtctgctattttatgtaagaatccgccgatttcttcaaggtccgtaatcgccgcctgcaaggaatcaataaacgcctgctcagcctgagtgtcataaaaaatcgggcctttatcgtaggattgcgcaatatcttcaatggtattggtcacgtcctgtgcttgaagctgatcaaacaagccgtgtccgacttggccgtaaaattctgttttcagctcggcgactttttcatcgtgctcctgataggcgttttgcgcttcttttttcatcgtccgcaaatcctcagtcatagcctgcaccttttcagccagcttctttgcgtttttcggcgttacttttattgtatctgcgcttccgatcgcaccggccggcagaagagcgccgaggtttttatcgaagactaactcatctccgttcggatttgcaatagtgccgtttctgtcgaacacgaaatttgcttcgtttaagccgtgtgtatccggatttctcagaatgacggtagtgaagaaataagcgagattcttgctgatctgctcgtttaagttcccatcaagccgctgctttcggctgaactgtgagagcgaggggtttttcgtataaatcgttgtcccgttgtggcggtcatattcgttccaataacctgccccgaccatgtcgtccggattgataattgaccggatgtaaggatcgtatatgccgctgttgatgtctttctgtgtttcttcattgtgcagtttcacgacggaaggactgttaaacgcgacggcgtacacatcattattcaccgcgctgtattcggcctcagcgccgccgagtgaatggccggttgttgaaataatcgttgacgttccggcatactttttctttacgccgcgtaccagctgatcggcttgatcgatttgcgatgttttcgttatcagcttatactttccggttgtgagcatggcgtcttgagagggcgttccattgtattttccgagtgttttcgaggtatcctttgcgtctttttttacaatataatgtacttcttttttcggatcatttccgaaaacaatattgttgccgtccgcttttacgccgtcattgatcgggtcttttccgatatcggttcccgcaaaggcgacgaccacgttttcagggttttttgattttatccattttccgtttttggacttgatgccttttgagaatacaaaggcatcaagacccgtatcagaatcctgcttcactttctcaacgtaccaatatgacgtcttacttattttataaggagttttatatttcatatgcagggctaacattttataattgtaagctgcttgactcaaacggtaatattctttatctgtgacattagagacggttatttcttttccttttggcatatatacatcacctttcttatattgtaaaatagttccgaaaggatgatacgcatgagaaaatacattattatcctaattgttataattatagcagtgggagggtttttcgtgaagcgtcaatatgataaacataaaaacgaagaaaaacttgtgattgaggcgcaagagcacatgaagaattacttaaaaaaagactataaaaatgtacaggaagttcatttttcaaaagactacaatatcgatccgacaggcggagttgaagtttcaggctacataaataataataaagaaaaagaattttccggtatatatgatccaacgaacaaggagataggtatttcagtggtcaatgccgaagaaaggtaaaatacccacctcagggatgagtgggtatttattttgtttaattatcttacaaaattcgtgatatgtttctcatacagttcaaacctattcctgagaccaatcgcctctaccgtctcatttgtcgaggtatccccgatattaacgatacaaatatcatgacaactcaacgataggaaaaacgtcagatcagcatttcactcgctttaagttccaatcttaacttgccagcaacaatcgcgatgaattctgaattggttagctttgcttttgacatgctgaaagtatattcatatcaagttttcagtagttgtgtttacttaatccatgaggggaagtcaaagaagcactgcaatattaagctatcaaacatttatgatgaaccaaatcctattgtaggttccgatcgttcgatgtatcctccgcatcttcttttacaaaataatacacttcttttttcggatcatttccgaaaacaatatttccgcagtcaaagatcgggccttttgcgatttcgcttccggcaaaggcgacgaccacgttttcagggttttttgattttatccattttccgttattcttcactgcttgtactaatacaaccgcatcaagtcctgtattatcgtctgattttatttgatcgacgtaccagtaagtaggttttgaaatggaagaattaatacgtatataatcgttcttctctaatttctttttaagatagtcatagttataagcacgttgactcatcctgtaatatgtttcatctgtcaggtttgaagtcctgattttcttgctcaagatatacagcacctttcttgtcatgtaaaatagggtagggaaagggatgattttttttgaaaaaataccttattattgttctagtgttaattataaccgttggagggttgattatgaagcatcaatatgatgtgaaaaaggaagaaaatgctcttttcgaaaaagccaaaagtaaaatgaccgagtacttgcgtagtgagtacaaggatatagagaagatttcttatgatgattattttattgatccaaccggtggaattacagttgaggggtatctaaacggcgataaaactaaagaatttgacggcttatatgatcctgtaggagacaaaataggaagctcctctgtggatgcggaagaaaaatcttaagacgcctaaatgcaccggatgtcaccgaccattttttctagttcgcgaacttcatcataactcatggaaaggatgagttatgtgaaaaaatacgtttttatcttcatagttatctttatagcagccggaggttttataatgaagagtatgaatgataaaaatgttcaggctgaagagataaagattgctcaagaacgaatggagaaatttatcaaagcgaattatgaaggcatacataacgttacatttaaagataaatacgaaatagatccaatgggcgggatagaggtatttggctattacaacgatgatacatcgaataaattcgatggtatgtatgataaggccaatgacaagatcatggggcactcaatagacgctgtaagaaagaaagaatgcagagataaagattgtgattattaataaagacgcccgtctggtatgaacatatagtaaacgaaaaagacaagggttcggcatttgccgcccttgtcttttttcattgaacattggaaaacataatcagaaacagctcattatttgacagtccattttaacagcgttacaattaaacgtgtaaatagttacatgtttaagtaaacataataactcgggaggtgatacgtccttgaatgaaccttctttaaaaaagtcatttatgagtcagtgaaccgcatcattgatcccgagcatgtttatttccgtactgtgcctgtgtttgaaacaagcagcgaggcatatcagcatctgcaggaccggctgtttatcggggctgcggtccgattgccggatgacattcggttagatatttatgaagttcaataataatatggagagtgagtcaacatggaaaactttatcggaagccatatgatttacacgtatgaaaacggctgggagtatgaaatctatattaaaaatgatcatacgatcgactatcggattcatagcggaatggtaggcggccgctgggtgcgcgatcaggaagtgaatatcgtcaagctgacagaaggcgtatacaaagtgtcatggactgaaccgacaggcacagacgtttccttaaactttatgccgaatgaaaaacggatgcacggaattattttcttcccgaaatgggtgcatgagcatccggaaatcacggtgtgctaccaaaatgattacattgacgtgatgaaagagtcacgtgagaaatatgaaacatacccgaaatatgtcgttcccgagtttgcggatattacgtatctcaacaatgcgggaatcaataacgaaacactgatttcagaagcgccgtacgaaggaatgaccgatgatatccgtgcgggaaaattaaaataagacaaaaaacccggcagcttggccgggtttttttgtatccttttacgacagggttttggtcatgataatgtcgacttgtttatcatcccccatataaaaagagtgttctccggtttggacaaaccccattttttgataaaaggcgattgcattttcgtttttttcccatacgcccagccagatgttctttttattgtgtgctgttgcgattttcacagcttcattcagcagatatttgccaagtccgtgtttctgatggttttttcttatataaattctctcaatctcaagagaatcatcccccattttttctgactgtgcttcgttcatgttgatttttacataccccgcaaggtcatcatgataataaacaaaatagaattgagaagacagattggataattcctttttcagctgttcagagcggaatgcattttccaaataagctttcatattttctggtgaattttgatctttaaatgtatcatggaatgtttcaatgcttatctcccggagctctataatatcgttaaggctgcacttttttaattgaatactcatggtcatacagctcctttcttcatttatcatatcagctgattttttgttgtatttgcaatgaaaataccgtatagtaaacatatcgtatttttgttgtatttgcaacataaaataagaaaatgaggacgataaagtgaaatatgttttttatgttttaggaatcatgatcttgacctttggtgtttctgtcacgattcaatcagggcttggaacgtcgccttttgatgcgcttattgtgggattgtccgtccatgcagggcttaccgtgggaagctgggaaatcatcatcgctttcctgttaatttgctgtaattcaatgttaaaaaggcaaaggccggtattttcagggatgattacggcgtttataacgggaatcgggattgatatgtggcttttttttctgcatcgagtcataacgcctgaactgtggtacggaaaagcgggctgttttgcaatcggtttagttgtgatagggataggaaccgcaacctatctgcacacaaatttcgccccgatcccggttgatcggttaacgctaattgtccgcgaattaaccgggagaagcatctttttttcaagaacggtcatttacttcatatttttcatactggccgtgatgctaaaaggtccggtaggcatcggaacgttattaaccgtttgtttaggagggatcatccttcatttctttatgccgattaccggaagatggatagacggcatattaacagcatctccaaaacaggaagaaacgaaaacccggtaacgggggtttttacccgattctatctttttttcatttcatccgtatgttcaaggtataataaaaaagggggagggatttttatgagcggtcaaagaaaactcgttttttacggagctgtcagcgcagatggctatcttgcgcgggaaaatcattctttagattggttaatcggaactgaaggtgaagacggcaccgattatgaagctttctatgaatctgtcgatacgatcatcatgggcagaaaaacatacgaggaaatattggttttaatgcctgaggaatttccgtacaaaggtaaagaatgctatgtgttttcgcggacattgaccgggcgtactgaacatgtgcggtttattcatgaagagcctgccgattttataaaagcattgaaacgccgagacggcaagcggatttggattgtcggcgggagtgatctgctgcacccggttttggaggaaaaacttgtcgatgagtttatcattcagatcgcccccgttctgctcggccgcggaatttttttgttcaaacccggagaccgggagacagggctgaagctgactgatgtcaggcgctataagcaatttgcggagttgcattatgaagtaagatgaaaacgaaacgccaagggagccggctcccttggcgttttttatgcttgaaacaggatgcggcgttttgctgcatcgggatcactttcgacagcggtatccgtgttgaaaagcaaagtttcgcgtgaatcggtttcatattcaggccaattgaagtgagaggtgttcgggtttccggtttttgcaaaagcgagccatgcggattggatttgtttggaaagctgttctgcgtcatcaccgagcggttcttgcagcgtctttctcaaagaatcaaagtttccgaacacaaacggcaattccagagcgtgaacggctttatgaaacggcggtgtttcgccatgccaatcaaagcggtacatccagaccggtgcgtgctgcgactgtccttgtgcgaaagcgacagccggccgccagaaaatcagatccgtcatcatatcgatttgtccctttaatgaatgcggatataaatctgccgcttgctcggtgcagttctctccgaggtgataatgcaaataatcttgctgctttttctcggaatgaatgtctgtatcaggggtgaaaaacaaatatgcttcatcacgattggttccgatgatcataggtatgccttctgcggccccgtctgctatggctttcaccggttccgcaggcaatgtggccggatcgatggcgggctgaaacaaaagctgaaaaaggttttgatctagtgagcgccgcactttatccgcagtcttaagcaggtcattaacggaaagctcctgcaattgatcagtgccggcttcatgaataaatgccgccgcgatgtcttttgccatgtccgccgggatcgtatgagaggcgccgctttctaaaatggctttatgaaacaggccttttgcgtcaggcattgccataagggaggcgatgctcatgccgcctgccgattcaccaaatatcgtgacgttatccgggtctcctccaaattcggagatattgtccctcacccagcgcagggcggcgatctgatcgagcagcccgatattggcggaatacgcgtcatgaatagaagacaaatgtaaaaagcctaacggtccgagcctgtaattaagtgtcactacaatgacatctccgtcagcggcaagggcagatccgtcgtaaagcggttcgcttccggcacctaaataaaatgccccgccgtgtatccataccatgacaggctttttttcgccctctgaatcgggggcgaaaacattgaggtaaaggcaatcttcagattgaggcggtatatctccggaaaacgatatagacagcatatcatccggctgcggacaaatcggcccgaacgaatcggcatgttttacgccatcccaaggtgcgggcggctccggcgctttaaatctgagctctccgacgggcggcttcgcgtacggtatgcccttccatgtgcggacgccgcggccggcagttcctttcagtgcgccggagcgggtttgaacggtaagttttgtcatcatttcatccccttttttcttttcattataaacagagatgaagacatgaagcgaataaaagccttttcatcagcatatcattagtaacgcttccgttctaaaaatgatctgacttcctgaacggacaagccgagttctttggcttcctgcatcagcgctttccattcctcaatgttggattcagtcagttttctgttgcggtagggtgcgggctccgggcgtttttcagtcagtttgttcgtaaaggtgaacagttcttctttcggcatgcccgactgcacggcctgcacaaggtggatgcgccactcatcttccgtgtctcccatgtgatgcagcatcgtttcggcatcaaaaagctccgtcagatcgacctgcagggtggcggatacttttttcagaaattggatggacggatttgagtgaaccccccgttctatcttgcttaaataagatttagagacacctgcttcaactgctagctgattaatagagtagccttttcttctgcggtataaacgaattattcttccaatcattgtgctgaattctcccctgtatactggcttttttgttcattataagaaatctttcgttctttataaaatttaaaattataaggtaagtgcagtaaataagaggaaaatcatgataatgttctctaaaaagaaccaaatggcttaatttgaaattttcaaatttcgaccttttcttttataatccaatcattaacagaagggggcgtttaagcctgatgcaataaggatgaggctgtaattacatgaatgagaatatgagttttaaagaattatttgacattattaaacacagacttttactgatttttatcatgacagcagttgtaacgctggtgacgggatacatccaattccgggtgatttcgcccgtttatcagtcatcgacccaagtgctcattcatgaaacaagcggtgaaaaaaattcgaatctcagcgacgtacagctgaatcttcattacaacaatacgtttcaaacgataatgaaaagcccggttgtgcttgagaaagtgaagcagacgctgcatctttctgagacggcatccgctttaaaagcaaagatcacgacaagcagcgaaaccgattcagagatcattaccgtagcggtgcaggacgagaatccgaaacaggccgccgctatagcgaacacgctgatgaagacatttaaaaaagaagtccgtgacaggatgaatataaaaggcgtcattgttttgtctgaggcaaaagcatcggaaagcccgatggtcaagccttcgcgcatccgaaatatcatgatggcgttcggtgcggctctcatggcgggtgtgacgcttgcgttttttctccactttcttgatgaaaccgttaaaagcgagcggcagctcagcgaaaaaacagacttgcctgttttaggggttgtgtatgacatcaaaaatcagcagacacggtctgatgaaaaacatttcggggagtgaggcgtttgggattcagaaaaaagaaatcaagaaggggactggctcaaatatccgttttacatcacaaatcattggtggctgaacaataccgcaccattcggacaaatattgagttctcctctgttcagacccatttgcgctctattctcgtcacttcttccgttccgggagaaggaaaatcattcagcgcctccaaccttgccgcggtatttgcgcagcaggaaaaaaaggtgctgctcgtcgatgcggatttacgaaaaccgacgatacacgagacctatcagcttgaaaatgtacaaggcctgacaaatgtgttagtcggaaacgcttccctcggcgaaacggtgcaaaaaacgctgattgacaacctctatgtcttaacgagcgggccgacgccgccgaatccggctgagcttttatcttcaaaggcgatgggagagctgattcaggagatgtacagccggtacagtctggttattttcgattcacctccgcttttggctgtggcggacggacagattttagcgaatcagacagatggaagcgttctcgtcgtcttgagcggaaaaacgaaaatggataccgtccaaaaggcgagagacgcgctccagcagtcaaaggcaaagcttttgggggcgctgctgaataaaaagaaaatcaaaaaaacggagcactactcgtattgagcggtgcaggtgatgtctccttacctttatcaacggaggcactcggctctgctgtgggcggcgtttttcgctgccttagatgctggtcgtcggtggcggggtgtgaggacgggttaaatgcccaatttatcttaagatgatgcattgttatcggcttagctgttatgtctgttttttaacgaaaaccgtatcagctaaaccgataaatgaggaggggaaagattgacttaccggagaagactttcaatgatatttgcattggatacgtatctcgttttactttccgttgttataggatatcaattttttgaggattcttatcacttttatgactccggagcgttgctgctgactgccgtgagcatgctgatcagccatcatgtatgcgcttttatgtttcaccagtataagcaggtatggacgtatacgggaataggcgagctgcttgccttgatgaaggggatcacgctgtcagcagccgtaacggcggccgtccaatacggggtgttccacacgattttgttccggctgttggccgtcagctggatggttcagctattgttcatcggaggaagccggatgatttcacgggtgctgaaagaaacgatcggcaggaagcaaaatgactcttcccgggcgctgatcatcggcgcaggttcgggggggacactgctcgtccgtcagcttacccagaaaaacgatctcggaatcatgcctgtggcttttattgatgatgatcagacgaagcataagctcgaaatcatgggcctgcccgtcatcggcggaaaagaaagcattatgccggcggtgcagaggctgagaattcaccatatcatcattgccattccgtctctttgcacccatgagcttcagacattatacaaagaatgtgtgcagacgggcgcccatattaaaatcatgccgcaatttgacgagatcctgctcggaacgcaggctgccggacacatcagagatgtaaaagccgaagatctgctcggcagaaagccggtcacccttgatacgagcaaaatttctgacagcatcaagggaaaaacgattctggtcacgggcgccggcggctcaatcggttctgagatctgccgccagatcagcgcgtttcttccgcgggaaatcgtccttctcggccacggagaaaacagcattcattctgtacataccgagctgtccgcacgcttcggcaaagaggtgctctttcacgcggagatcgccgatattcaggacagagataaaatctttaccttgatgaaaaaatacgagccgcacgtcgtctatcatgcggctgcccacaaacatgtgccgttaatggaacataatccggaagaagccgttaaaaacaacatcatcggcacgaaaaatgtcgccgaagccgccgacatgtgcggaacggaaacattcgtgctgatttcttctgacaaagcggtcaatccggccaatgtcatgggggcgacgaaacggtttgcagaaatggtcatcatgaacctcggaaaggtcagccgcaccaaattcgccgccgtccgtttcggaaatgtgctcggaagccgcggcagcgtaatcccgattttcaaaaagcagattgaaaaaggcggacctgtcaccgtcacgcacccggcgatgacaagatattttatgacgattcccgaagcgtcaagactcgtcattcaggcgggggcgcttgcaaaagggcggcagattttcgttctggatatgggagaacccgtcaaaatcgtcgatctggccaaaaacctgattcatttatcaggctatacgacagaacagattcccatcgaattctccggcatccgcccgggagaaaagatgtatgaagaattgctgaatcataatgaagtacatacggagcagatttttccgaaaatccatatcgggaaagcggtggacgggaattgggccgtgctcatccgttttatggaggaattcagccgtctgcctgaagaagagctgagaaaacggctgtttgaggcgatcgaatcagtacatgaagaagcggccgcaggcgtgtgatgggaggacagaaagatgacgaaaaaagtattattctgcgccactgtcgattatcattttaaagcctttcatcttccgtattttcaatggtttcaggatatgggctgggaagtgcacgtcgcggcaggcggcaatatgaatcttccgtttgttgatgaaaagttttccattccaatccggcgctcgccgtttcatcccgaaaatctttctgtttacaggcggctgaaacggctcattcaggacaacggctatgacatgattcactgccatacgccggtcggcggcgtgctcgcacgccttgctgcgagacaagcgcgccaaaaagggacaaaggtgctgtacaccgcgcacggctttcacttctgcgacggagcgcctctgaaaaactggcttctttattacccgatcgaaaaatttctctcttcttatacggattgtctgattacgattaatgaagaggattacgaacgggccaaacaaatgaaaaaaacagcttgcggcgcgaaaaaaatacacggcatcggggtgaatacagacaggtttcgccctgtgagccgggaagagagtgaacgtctgagagaaaaacacggcttcggcgccggggaatttattctcgtttatcccgctgaattaaacggcaataaaaaccagggacttctcattgagactgcggcactgctgaagaaccgcattccggagctgaaactcgtatttgccggagaaggcgcgatggaagcgccgtacagaaaaaaggctgaatcactcggtgtatccgacatggtgcggttttacggtttttgccgcgatattcatgaactgattcagcttgccgatctgtctgtcgcctcaagcatccgcgaaggactcggcatgaatctgcttgaaggaatggctgccgaaaagccggccgttgccgcggacaacagggggcaccgtgagatcatcgaagacggcgtgaacggttttctcgtgccggccggggacagcgcggcgtttgccgatcgaattgaaaagctgtaccgctccccgggtctgcgaaaagcaatggggcaaaaagggcgcagcacggcggaatgtttttctgaaacacgtacggtaaaggaaatggcgcacatttacgccggttatatggataaaaaggagaaaagcgtatgaatgcaggagcacaaccgaaaatttccgtgatcatgggaatttataattgcgaagagactttagcggagagtattgaatccatcctgagccaatcttataagaattgggaactgattatgtgtgatgacgcgtcaactgacggaacgtatcagattgcgcgccgttacgcggatcattacggcgaccggatcacgctgattcaaaataagacaaatcaacggcttgccgcttcgcttaaccgctgtctgacatacgcaacgggggattatatcgccaggcaggacggtgatgacatctccaacccgaggagactggaaaaacaggccgctttcttaaacaagcacgcccactatcaagtcgtaggcacggggatgctcgtatttgacgaattcggtgtaaggggcgcccggcttttgccgcccgtgccgaaaccgggaattatggcgaaaggcacaccgttctgccacggcaccattatgatgcgggctgaagcgtacaaagcgcttggcggctaccggtcagtcaggcggacgcggcgaatggaggatatcgatttgtggctgcgcttttttgaagcgggtttccgggggtacaatctccaagaaacgctgtataaagtcagagaggacagtgatgcgtttaaaaggagatcgtttacgtattccattgataatgcggtcctcgtttttcaggcatgcagacggctgaagctgccgctttcccattacgcgtatatcgcaaaaccgctcatccgcgccattacgccgcccgcggtcatgaaccgttatcataaaaacagggacatccgccaaaaagaagggcttgccgaacatgactgacaaaccgatacgggtgctgcacatcttcagcggtatgaacaggggcggcgcagaaacgatgatgatgaatttgtaccggaagatggacagaacgaaggtgcagtttgattttttaacccataggaacgatccgtgcgcttatgatgaggaaattctcgctctcggcggacggcttttttatgtgccgagcatcggcagcacaaacccgattacatttgtgaaacaggtcaagcgggtgattaaggaaaaaggcccgtttgccgccgtgcacgcccataccgattttcagtctggatttatcgcattggccgctcgtttagccggcgtcccggtgcggatctgccattcgcacagtacgtcgtggcgggggcgggcgtcgcggcttgccgggatgcagctgtttgttttcagacggctgatcacggcaaacgccacggcactgtgcgcctgcggagaagacgcgggccgtttcttattcgggaaagaaaaagacgtgcatcttttgccgaacggcattgatctcgacttatttgccggcgggtgcgcggacacagaagctgaaaaaaggaagcggggcattgcagacggccgtttggtgatcggccatatcggccgctttacagaagaaaaaaaccatgaatttctgctccggctggccgctgatatgaaagagcggggcatcggtttacagctgattctcgccggagacggtccgcttcgcaccgacatggaaaatctgtcggcgaagctggggcttgatgatgaggtgcgttttatcggcatagaagaccgcgttcatgccctgctgaaaacgctggatgtatttgtcatgccgtctctttatgaagggctgcccgtcacgctcgttgaagcgcaggcctccggggtgccgtgcgtgatatcagacggcataacggaagaagccgatgccgggctcgggctggtcaaaaggctcagcctcaaagaactgcccggacaatgggcatccgcggttttacgggcagcagaggcggcaaagcctgacggggagcgcattaaagaaaccctcaggcggcagggatatgatgcgggagaaaatgcgggggctgttatgaagctttacaatatgaattggaaaaaggaacagtaacgaatgattgtatacgtagtcaatatgggaattgtgtatatttggtcatggttcgcgaaaatgtgcggcgggcgtgatcaatcgctttcgaccggataccggccgaatcagctcgtcatgatcgttccgctgctatcgctcgtattggtctccggcttgcgctacagagtcgggacggattttcagacgtacgcgctgatgtacaagctggcgggaaattacggcagcatttgggagatcttcgggttcggagcgaaaaaagcagccgttgatccggggtttacggctctcatctggctcatgaattttatcacgaaagatccgcaaattatgtatttcaccgtagcggtcgtgacgtgcagctttattttaaaggggctcgttgagttcggccgtccgtttgagctgagtgtgtttttgtttttgggcacgtatcactattacgcttcctttaacgggatcaggcagtatatggtggcggccgttttgttttgggccgtccgctacgtgatcagcggaagctggaagcgttatatgtcaatcgtgctgctgtgttcgctttttcattcctcagcgctgattatgattccggtttattttctcgtcagaaaaagagcctggtcgcccgcgattttcggactgtcggcattgtttcttcttatgacgttcctgtatcagaagttcatttcgctgtttgtcgtcgtgctggaaaacagctcgtacggccattatgagaaatggctgatgaccaatacgaatgggatgaacgtcgtaaaaatcgcggtgctgcttctgccgctgtttttggctttctgctatcgggagcggctgcggaagctctggcctgacattgatgtcattgtgaatttctgtttgctcggcctgctcttcggtcttttggcgacaaaggatgttatttttgcccggtttaatatatatttcggcctgtaccaaatgatcctgatcccttattttgtgagaatttttgatgaaaaatcaaatgcgctgatttatatcgccattattgtctgttattttctttacagttacttgcttatgccggtcgattcgtctgtgcttccgtacagaacgattttttcccggtaatggacactggaggtttatatggaaacacccgcggtcagtttattaattgctgtgtataatacggaaacttatttagaaagatgcttagattcattgctcaatcagtcgctcgccaatatcgaaatcgtggccgttaatgacgggtcaacggatcaaagcccggccattcttgaaacctatcagaagcgggatgagagaatcagggtcattcatcagcaaaaccgggggctcggcgcggtccgcaacaagggcattgaggcggcgcgcggcgaatttatcgcttttattgatgcggacgactgggttgaacctgattattgcctgtgcatgtatgaaaaagcgaaggctgatcaggctgatctcgtgatttgcgaatatgcggccgaatttgcggatacggggaaaaccgccgtttcaacgatcgcttcagcgtacgaagaccgcccgaaacaactgtacctgaaagatttatttgaaggaagagtcagcggtttttcatggaacaagctgtacaaaagaaccatgatcgagcatcatcagctgcgctttccgcttcgtgatgagctggagcacgtggaggatcagtacttcagcctccgggcgcatgttttcgcaggtgcggtctcatacgtggatcagccgctctatcattatcggattcacttgacttccattgtgcaaagctatcagaaaaagctgtttgactcaggtctcgttctctatcggctgaacgaggcttttttgcgtgaaaacggctgcttacaggaataccggcaggagctggattttttcatcgttcagcacggaacagtctgcctgctgaatgaatggaagcggaataatagcggccggttttctgagaagtggaagaatatcagccggatatgcgctgatcccgtatttcgcctgagcctttccaaaaccggaacggcgccgtttgacgccaaacgctcatgccttctgcttttggcgaagctgaagctgattccgttcgtgtcgctggcatccgccgcgtatcagcgggcaatcgagtacaaaatgaaaatcagagggtgaagacatgtcgatacaatctttaaaaatcaatctcgcggaatggctgttgcttaaggtcaaatacccgtcccaatttcacttcggaacggcagcggatggggcggggcttacagcggcaagaaaaaagatcattctgacgctgctcccgtcccacgataatctcggcgatcacgccatcgcctacgcaagcaaaacgtttcttgaacgggagtatcccgattttgacattgtcgaagtggatatgaaggatatctacagatcggcaaaagcgctgatcaaaaagcgccaccccgatgatatggtattcatcatcggcggcgggaacatgggggatttgtacaggtatgaggaatggacgcgccgctttattatcaaaacattccgggaatatcggatcgttcagcttccggcgacggctcacttttctgaatcgaaaaagggacggaaggagctgaagcgcgcccgaaaagtgtacaatgcgcatcccgaccttttgttaatggcgagagatgagacgacgtatcaatggatgaagcgtcattttcccggaaaaacagtgctcaaacagcctgacatggtcttatatttggataaaagcgagcggcacatcccgcgggaagggatctacctctgtttacgggaggataaggagagtgcgctgacggctgaggacagaacgatggtaaaagaagctttggcaaaagagtacggagagctgcattcctttaccacgacggtcggccggagggtcagccgccatacacgtgaaaaggagctggaggcgctttggaatacgctgaaaggcgcggaagccgtcgtcactgacaggcttcacgggatgattttttgtgcgctgacgaaaacgccttgtgtcgtcattcgttcgtttgatcataaagtgatggaaggctatcaatggctgaaaaacataccgaacatgacattgcttgaacgtccagaccctgaagctgtaacggccgccgtaaaccggctgctcagcggcaagcatgaggaaggcggttctttgcgaagtgtttattttgccgggctgcgctcgaaaatcagcggtgatgcccaatgaccgcgccgcttgtgagcgtgatcgtgccgatgtataagacagagccttttattaaagaatgcgcggtttctttaacaaaacagacgctgagagacatcgaaatcattttcgtcaatgacggctcaccggatcagtcaggccggattgctgaacaattcgccgcagaagatgcgagaatccgggtgattcataaagaaaacggcggcctcagctcggcccgcaatgccggaataaaagccgcccgcggccgttatatcggttttgcggacggcgatgactatgtgacggaaacgatgttcgaaaggctttatgaagaagcggagaagaaccggctggatatcgccggctgtggttattataaggaaacgccgtctaagaaacgaacgtatatgccgccgtccattccgccgggccgcgtcttcacagcggatgaaatgacagcattgctgacccgtgcgcacgaacatcggtttatttggtatgtgtggcgctatatataccggcgggaatcattgcaaggactgttgttccatgaagatatccggtttgccgaggactctccgtttaacttggcagcgttccgccaagccgcgcgtgtcaaagtgatagacgaagggctgtatatctaccgggaaaatccgcaaagtctcacagaaacaccgtttaagccccacttagatcaagaactgcaaaagcaatatgcagcgaaaatggctttttatgaggcgaacgggctgacggacgcctgccggagcgatatcgatacatatttgtgcaagcatcagattccgatgctgatcgccaacgcatgcgccgcgccgcagccgtcacatcagattacggcgcacatcggcagaatcttaacgtatgacatggtaaaaatggcggtgcgcaggacgccgtgccgccataaacagctgctggcgggggagcgcgtggtgctcggcctgtgcaaaatgcgccttcctcttcttctgcatgcgtttttcgaacggaaatcgaaagagaaaggcagtgcggaaggagcatgaaatttgccattaatttcggcgccaatgtgacggcgtttttactatcggtgtttttatcagtgtggatgacgccctttattgtgaaaacattaggtgtggaggcttttgggtttgtccatctgacacagaatatcattaactatttctctattattaccgttgcgctgagctctgtcgttgtgaggtttttctccgtcgccgcccacagggggaacagggacgaggccaatgcgtatgtaagcaattatttagccgcgtctgtcgtgatatctctattactcgctgtgccgctcgccgggacggctttttttattgacaagattatgaatgtaccggccgggctgctaacggatgtgaggctctctatcgtaatcggcagcgtgctgtttatgctgacgttttttatggcggggttcgcgacggggccgttttttgccaacaagctttatatcacaagctccattcaggccgtgcaaatgctggtcagggtgctgtgtgtgctcgctctgtttacgtgcctgccgccgaaaatctggcagatccagctttcggcattagcgggagccgtctgtgcggccgtgctgacttttttcttctttaagaaattgattccgtggttttctttcagccgtaaaaccttgtcattacaaacgagcaaagtgctgttttcggccggtgcctggagctctgtcaaccagatcggcgtgctgttgtttctgcagattgacctcatgacggccaaccttgtgctggggccgtctgaagcgggtgtctatgcggcgattattcaattcccgctcctgctcagaagtcttgccgggacgcttgcttcactgtttgcgccggttttgacttcctactattcaaaaggggatatggaaggtctcctgtcttacgccaataaggctgtgcggatgaacgggcttctgctcgcgcttcccgccgcattattaggagggcttgccgaaccgtttctggcgatttggctgggcccgtcgtttgtgcagacggcgccgcttttatacattcacgccgcgtatttgacggtcagtctctctgtcatgccgcttttttacgtatggacggcttttaataaacaaaaaacgcccgccgtcgttactttatgtttaggcggactgaatgtcatattggccgtggttctcagcggaccggcacatctcgggctgtacggcatcaccatcgccggggctgtctccctcattttgaaaaatgccgtcttcacgccgctgtatgtttcgcatattacgggctttcagaaaaccgcgttttacaaaggcatgttcggaccgttggcggcggctgtatttgcctgggctgtctgccggggtatccggctgttttcaccgcttgacagctgggccggcctgatcgccgcggggcttgccgtatgcataagctatgccgcattcgcttttttcttcatttgtacgaaagaagaaaggcggcttgctttacagaaatgccgaaaagtgaaaggagctgttcagatttgaaggcgaaacgtgtatttgatatagcggccgcgacgttgttattgtgcggcgcgagcgtcatccttctcttcgccatggccgccgtcagatgcgccatcgggtctccggtattgttcaaacagacgagaccggggcataacgggcgtccgtttacgttgtataaactcagaacgatgacggatgcgcgtgatgaaaacggtgtgctgcttccagatcatctccgcctgaccaaaacgggaaggctgatcagaaaactgagcatcgatgagcttccccagctttttaatgtgctcaaaggagatatcagtcttgtcggcccccgccctctgctgatggattatctgccgctttacacggcggagcaggcgcggcggcacgaggtgaagccggggattacgggctgggcgcagattaacgggagaaacgcgatttcatgggaggaaaaattcaagctcgacgtgtggtacgtcgacaaccgcacatttcttctcgacttaaagattctgcttttaacagtgaaaaaagttctcgtgtcagaaggcatacatcaagccggccatgtgacggcaaagcgcttcacaggcagcggagatatgtcatcgtgaaaaaggtcgtactgatcggaaacggcggacacggaaaagtcgtgaaggaaatcgtgcaggcccgttccgatatggagcttgcgggcatactggacgacggattcagcggttttgccgttcggaacggtttatatacgggcgggacgaaagacgtgcacatgcttcggaaactcgtccccgaagccgtgttcacgatatgcatcggccgcaacggcgtcagaaagcagttcgctgaaacgcttgggattgaagatgacgattatgccgcactcattcaccccggggcgatcgtcagtgaaacggcttccgtcggacacggaacggttgtgatggcgggcgccgttattcaggcgggcgctgacatcggcgcccattgcatcatcaatacgggggcggttgccgatcatgacaatgcaatcggagattacgtccatctttcaccgcgcgcggcgcttgccggcggagtgaaagtcggggaaggaacgcacatcggaatcggcgcgtccgtcataccgcagattgacatcggcccttggtccgttatcggcgcgggggctgcggttatcagccggcttcccggccatgtgacggcggtcggcgttccggcccgcatcatctcccctatccataatgaaaaaggatgatttcatgcaaacaaacaaacggatttatttgtctccgcctcatatgagcggaaaagaacaggaatacattgcacaagcttttcgttccaattggattgccccgctcggtccgctcgtcaattcgtttgaagcgcggctcgcggaatatgcgggagtgaaaagcgcggcggccgtaagctcgggaacggccgccatccatcttgccctgcggcttgcgggtgtgaaaaaaggagacgctgtattttgtccttcctttacgtttgtcgccacggcgaatccgattgtgtatgagcaggctgagccagtgtttattgattcggaatgggagacgtggaatatgtcgcccgatgcgcttgagcgggcgctgcgggatgcaaagcggcgcggcagactcccgaaagcggtgatcgccgtcaatctttacggccaaagcgcgaaaatggatgaattaatgagcctttgtgacgcatacggcgtctgtctgattgaagacgctgccgagtccttaggatcaacatataaaggcaggcagagcggcacgttcggccgtttcggcatttattcctttaatggcaacaaaatcattacaacatcgggaggcggcatgctcgtgtctgacgatgaagccgcgattgaaaaagcgaggtttcttgcgtcacaggcgagagatgccgccgttcattaccagcacagcgagctcgggtataactacaggctcagcaacattctcgcgggcgtggggatatcgcagctggaagtgcttgaagatcgcgtccgggcgaggagagaaatctttcacaggtatcgggaagcgctggaaacgtatccgggcatccgcatgatgccggagcttgaaggaacggtttcaaaccgctggctgacggctctgacgcttgataacggcgtgacgccggaagaagcagtcgcctgtcttgcggaacagaatattgaggcccggccgctgtggaaaccgctgcatacgcagccgcttttctcatcttccgtcttttatcctcacagcgaacatgaacgggtctctgagaaccttttcagccgggggatctgtctgccgtccgggtctgacttgtcttctgaggatcagcagcgtgtcattgacgcacttgcgcaactgtttgaaacgaaaggggagaaaacatggacagccgccatgttatgagccgattaaaagaaacgctgacggggctgctcaacgttataccgccgcaatctgacatcatatatgccgactatcccctctacggaaatgtaggggatttattgattatgaaggggacggaggcgttttttaaagcgcacggcatccgcgtcagacagcgctggaatcccgacaattttccattcgggcgccgggcggacaaaaagacaatcatcgtctgtcagggtggcggaaatttcggggatctctatccgtactatcagacgttcagggaaaaaatcgtcaaatcctttccggaaaacaggatcgtcatcctgccgcaatccatttattatcaggatgagacacggctgcaaaagacagcggcgctttttgcggggcacaaggatctccacctgtttacgagggatcatgtgtcatacgagaccgcgaaacgctttttttcggcgaatcatattgggcttatgcctgatatggcccatcagctgtatccgatggcggcgtcagcggctccgtcacgcggcaggcttcattttatccgcacggatggggaaatcaatccgaagctgcaaaccaattcttccgttaaaagctgcgactggcaggatgtgctgtcagcaagcgaccgcaggggaatcgcttttttccaaacgctgaatgttttgaataaaaaagcgggaaacccgctgccgattgcgcggttttggaaacgctataccgatttcttaacgaagaaagcggtcctgtttttcagcagatacgaatcggtggaaacgtcaaggcttcacggccacattctgtcctcgcttctcggaaaaccgaataccgtcattgataattcatacgggaaaaacgccaactattattacacctggatgcacgaagcgccggatgtccgtctgatcggggaaaccgccggcacgaaggaaaaccttccgctttgaatgagcggaaggtttattttgtttctccacgttttactttgttgtacgcctcatccaaatgctgaattcttttgagcacaacagagtttttcgtcagctgatcctgaacaagggttgaaacgacggaacggtaatagctgttcatcgcatgaattcgatcttcattcggattcatttcaatatgctgtgtaaagttttcaataaaataaggaacagaaaaaagttctgacatctataaagcaactccttttaataagtatatacggtatgaaaccaatcatgtacaatgaaaaaaggggagtgagcatgatggatatcaaacttcagcaaacacaaatgttaaagcctcaattaacgcaagagcttaaacaggctatcacattactcggatacaattccgcggaactggccggatatattgatgagctctcactggaaaaccctctgattgaacgaaaggaaacagacacgccgccactatcttaccataaaacaaataaaaacaggatgaaagaacgggacggaagccagcagatcagacttacccgcaaaacgctgcaggattcgctcaaacagcaagccttagacatgaagctgtccgatgatgagaaaaaaattttcaattatctgatacattcattggattcaaacggatatttaaaagaggacataccagccgccgccgaccatgtatccgcttcacaagaggagacggaagcggttctgaaaaagcttcaatcccttgagcccgcgggaatcggcgcccggtctttgcaggaatgcatccttcttcagctccgccgtttgcctgagcggaacgaacaggcggaatggattgccgaagcctattttgagctatttgcaagaaagaactggaaagcgcttacactaaaaacgggcattccgcttaaagacattcaggacatcgctgacatgatcagcgcgcttgatccgaggccggggctctgttatgcgcatgaggagccgggtttttacgtggaaccggatattttcatcacagtgaaaaacggcatcattcaagcgcggctcaacagccgttcgtttcctgacatccagcttcatacccattatcagccgctactgtcagctgccgggtgccgtgacacgaaaaattatctgtcggcaaaatatcaggaatggcgctggctgaaccgggctttgtcgcaaagaaaacaaacgatcacgagaattatcggcgtcctgactgaacggcaggaatccttttttcttacaggaaaaagcggaatgcagccgctgaccttaagagaggtggcggaaacgctggagctccacgaatcaacgatcagccgggcaatcaaagggaagtacgttcagacgccgtacggactgtatgaaatgaaaacatttttctcggcgaaagctgaatcgtcgggggacggcggcgcctccaattatgccgtaaaagcgcatctggaggcattggtcggtaaagaagataaaaagaaacctttttcagaccaaaagcttgccgatctgctgcatgaacaatatgacatccgaatttcaaggcgcaccgtcgccaagtaccgtgaccaattaaatattccgccgtcatcggcgagaaaacggtacagctgaaacctccccgagccaaaccccggggaggttctccgtgttacgggatcatccatgaaaacagatgatgctgtaaaaatgtaatgagacagacgagcagaagcaaaaacagactgtgcttaatcgtaaagcggaaaaggtcggcttccttgcccgccagaccgacagcggcacaggcaaccgcaatggattgcggagaaatcatttttccggtgacaccgcccgatgaattggcggcaacggagagaaccgggtccatcccgacagagagcgccgtcaccttttgcaatccgccgaacaatagattggccgacgtatcagagccggtaataaatacgccgagccagccgagcaccggcgaaaaaaaggtaaacatcgcgcctgtcatggcaagcgcaagaccgagtgtcgtgctcatgccggaagcattcgtcacataagcaaagccgacaacagaaacaatggtcacgaccggaagcgttaattctttcaccgtttctataaacgcttcgccccaagtcttccacgacatgccgagggcgaacttggagatgacggcggcaatcagaatcgccgtccccgctgaaccgaaaagctcaagtttgtacacggcttcaataggcgtgccgtccgcctgaagaatctgctgatttacaaatgggacgggaggcgtgaaggtcaatgcacgcccggctgcattcagccaggaaagccacattgacgttccttcgtaatgaccggttaatgcagccttcacgcccggaatcccccagacggatatcatggccgtcagaagaaggaaaggagaccacgctttaaacaccgcggcgcccccgtacttgatcggcgcccggtcagcggccgctgctgattcccgttctgccgcgaaacgaaaggcctttttcggtttccaaaatttcaaaaacacagcgagcgcggccatggaaactagcgccgacagcacatccggaagctcaggccctaaaaaattcgagcttgcgtactgcacggccgcaaaggagacgccggaaacaagaatggccggccatatctcaaaagcctttttaaacccgctcatcaaaatgattaagtacagcggaataaagacggataaaaacggaagctgccggccgaccatttgagaaatttccattgccggtatcccggtcggaccttcgacggcggtaatcggaatgccgatcgcgccgaaggcaacgggcgccgtattggcaatcaggcaaatccccgccgcatacagcggctgaaaaccaagtccgacgagcaaagcggccgagatcgcgacgggtgcgccgaaaccggcggcgccttctaaaaacgccccgaatgaaaaggcgatgagcagcgcctgcaaacgccggtcatctgtaattgacagcaccgaactccggataatctcaaactgtcccgttttcacggtgattttatacagaaagaccgatgtgacgataatccagccgatcggaagcagcccgtacaccgctccttgagaagcggacatcaccgctttttccgccggcatgccgtaaacaaatacagcaattaaaagtgaaacggctaacgttaaaagccccgcgatgtaccccttcatccgtttcaccgcaagcgcccaaaaaaagaagataatcggcacgagcgcgcaagctgccgataaaagcaaatttccccctaaaggagcgtactcctgtgtccattgcatccctaaaaaacccctccttatgtcatgtaagcgattactttttatgataaggtcatctgatgaccgggttaattagcattatattttgaaagttttgaaagtacaatacttttcttgaacaaattgtctgaacctgtcggcaacacaaaaaaagaagtataatagacgataaacatcaagattcacaagtgacggggtgatcgcgttgaaatataaacaaattaaaacgaaaaaaatctacgaggaagtcgctgacgcattgctggagaagataaaagcgggcgagcttaagccgggtgaaaagcttgattccgttcaggcgctttctgagagttttcaggtcagccgctcggcggtcagagaagcgctgtcggctttgaaagcgatggggctcgtcgacatgaagcagggtgaaggcacatacataagagaatttgagccgtctcatgtttcccagccgctttcttccgccctcttgatgaaaaaagaggatgtcaaacagctgctcgaagtcagaaagctgcttgaactcggcgtcgccgccatggccgctgaaaaacgcaccgaagacgatttacaaaaaatccgccaagctctcatggagatgaaagacattgacggagacgaagaattgggcgaaaaagcggatttctcctttcacatggcgctggcggaagcatcacaaaacgggctgctcaagcatctcatgaatcatgtctccgcgcttcttttggaaacgatgagagaaacgagaaaaatttggctgttttctaaacgaacgagcgtgcagcgattgtatgaagagcatgaacgcatttacagcgccgtcgccgccggagacgcggatgaagcggaagccgagatgaccgcgcacctgacgaatgtggaagaagtgctgggggcttattttgaagaaaatgtatagaagctgacttgtgaaaggggataacatcacatgcaggccgaatcttttttttctgaccatgtaaagaaagctctgacaaacgatcctcccggggaatggatgccggcagttccgaaagcgtgcacccccctgcattccggctatcccgatcccgcactcgttcctgataaggagctgaaagaagccgccgcccgccttctggatgaggagcgcgatctgccgctgcattatatgggaaccccgaggacggccgttttaaaaaaacagattcaagaacggttagccatccgcggcattcactgccgggacgatgagctgctcgtgacgccaggcgcctgtcaggcgatagatctggctgcacgggttttcctcgatgaacaaaccgccgctgccgttgaagctccggtctacatggaagcgctcgagatttttaaaaattacacaccgcatatcatgagcattccgacagatcaagagggcctgcaaacagaaacattagcgttcatgcttgaggaaagaaaacgaaaagggcttctgcttccccgtcttctctacacgatacctgcttttcagaatcctgcgggaaccgtaatgtcagcgaagcggagaacccgcctgcttcagcttgctgaaacgtatgattttctcatcttggaggatgatgcatacggcgagctcggattcaccgatattccgccgcccttgaaagccatggatcaaaacggccgggtgctgtacgccggttcattatcaaaagtcatcgccccgggtatgaggatcggctggattgcaggggacgccgcattcatcacggcattgtcatggttaaaaaaagacttaggccacccgttttcccaagcggtgaccgccgtctatctggaacaaacgaatgttgaaaaacggctcgccgtcttgcgggaagcatatcaaagcaaacgtgacgttttgctcgccgcatcagagagatatcttccgaaatccgcatcctggcacgtgcctgaaggcggttactttgtatgggtgaaagcgccgggagcggatacatccgcaatgctggcgagggctctttctcacggcgtttcctatgtacccggtaaatatttttttctgcatcaggaagacggtgccgaatatcttcgcctgtcgttcagttatgccggtaaagccgcgataaaagagggtgtgcaaaaactgggacgtctgctggaaaacgggatgtagagcagcttgaggagctttcgggcttctcttttttttgtccccttcagcgcatcggacgaaaggatttttcagaaaaaccttccaatccatattcagaatagtgtaggatattcatagagcttttcctaaaaacaggtcatcagatgaccggatcacatattgaggatgaaagaggggttcatcatgaaagtctcattatttgtcacgtgccttgtggatatgttccagaccaatgtcggaaaggcgacggttgaggtgctggaacggctcgggtgtgaggtggattttcccgaggggcagatttgctgcgggcagcccgcatacaacagcgggtatgtgacggatgcgaaaaaagcgatgaagcggatgattgccgcgtttgaagaagcggagtacgtcgtcagtccgtcaggttcctgtacgacgatgttccgtgaatatccgcatctgtttcaggacgatccgaagtgggcggcaaaagcgcagcagcttgcggacaaaacatatgagttaacagattttatcgtcaacgttctcggggtggaggatgtcggggcggtgctgcaaaaaaaagcgacagtccatacatcgtgccacatgacgaggctgctcggcgtgtcggaggagccgatgaagcttttgcgccatgtcaaggggctcgagctgaccacgcttcccggaaagcaccaatgctgcggattcggaggaacgttttctgtgaaaatggcgcaaatctctgaacaaatggtggatgagaaggtcgcctgcgtggaagacacggaggccgaggtgctgatcggggcggattgcggatgtctgatgaatatcggagggcgtcttgaccgtaaggataaaaacgtcagagtcatgcacatcgccgaagtgctgaacagcagataacacgagaaacaacaaggggggaaaatcatggcgatgaaaatcggtaccgccgcttttaaagagcgggtatcagaaggaatagataatgagtttatgagaggagccgtctccggagcgcaggaacggctcaggacaagaaggcttcaggcggccgaggaattgggaaactgggaggattggcgttcccatgcggaagaaatcagacagcatgtgctggacaatcttgatttctatttggaacagctcgccgaaaatgtcgccaacagaggcggacatgtctttttcgccgaaacggcggaagaagcgtcctcctatatccgcgatgtcatccggcagaaaaacgccaaaaaaatcgtaaaatccaaatccatggtgacagaagaaatcaatatgaacgaagtgcttgaggaagagggctgtgaagtcacagaaacggatctcggcgaatatattctccagattgacgatcacgatccgccgtcacatatcgttgctcccgctcttcacaaaaacaaagagcagatccgtgacgtgtttaaagagagactcgaatacaaacagacggaaaaaccggaagagctcgtcatgcacgcgcgcagcgttctccggaaaaaatttctcgaagcggatgtcggcattacaggctgcaactttgcaatcgcggataccggatcggtcagtctcgtgacgaacgaaggaaacggccgccttgtgtccgcgctgccgaagacgcagatcaccgtgatgggaatggagcggatcgttccgtcattttctgagtttgaagtgcttgtcagcatgctgacgagaagcgccgtcggccagcggcttacaagttacattacggcgctgacgggacctcgtcagcaaggagaagctgacgggcctgaggaattccacctcgtggttgtggacaacgggcgttcccgcatactcggcacggaatttcaatcggtgctgcaatgtatccgctgcgccgcctgcatcaacgtctgtcccgtgtaccggcatgtcggcggacactcgtacgggtccatctattcgggtccgatcggcgccgtcttatcgcctcttctcggcggatatgacgaatacaaggagctcccgtacgcatcttccttatgcgcggcctgtacggaagcgtgtcccgttaaaattccgctgcacgagctgctgctcaagcatcggcagaacatcgtggaaaaagagggcaaagcgccgatcagcgaaaaactggcgatgaaagccttcgggttcggctcgtcatccccgtccctttataaaatgggatcgaaatgggcgcctgccgccatgacgccgtttacggaggatgacaaaatatcaaaagggccggggccgttaaaagaatggacggcaatacgggatttcccagcgcctcataaatcgagattcagagattggtttaaagaccgggaaaaacaaaagggggaagaatgatgatgaaagggacggttacacatcaggaatcctttttaaaccggatcgccgaaagtctgggcagagagcgcaggaaatcaggcgtgtccctgcctgaatggaagtatcagccacaatatcaaacgcatgcggactgtacggaagacgatcttgtcacgatgctgaaagaccactgcgtcaacattcataccgaactgatcgaaacggatgcagccgggctttacgacgctttgcgcacgcaggtgaaccgctttgaaggagggcctgtcatcattccgaaggacagccggtttgaaacgtacggcttgcagacccttatgacagaagagtggccggatgaagggattcccgtttgggaatgggacgcggaacaaggagcgaaaaatattgaaaaagcggaacaagcgaatgtgggcatcacattcagcgagatcacgcttgcggaatcagccaccgtcgttttgtatgcgtcagagcatgccggccgttctgtcagcctgcttccgaccacctatatcgcaatcatcccgaaatcttccattgtgccgagaatgacacaggccagcgatatactgaaacagcagatcagagacggcgtcaccgttccttcctgcatcaactatattactggaccgagcaactcggccgatatcgaaatggatttggttgtcggcgtccacggacccgttaaagccgcttatatccttgtgaatgaccgataaaaaaacaaaccccggtttgcggccggggtttgtttttatataaacgcgttaatgatcatgataaaacagatcgcactgacagaaataatcgtttccatcgccgtccatgtcaggaacgtttcttttaccgtcattccgaaatactctttaatgagccagaaaccggagtcattgacatgtgacagaatcaaagagcccgctcccgttgccaaaacgagaagctcgctgctgacgcccggcatgacagatgcaatcggagcaacaatgccggccgccgtcatcatggcgacagtcgctgaacctgtggcgacgcggatgaccgccgcgatcgtccagcttaaaagaacgggagagaagcttgaatgcttcgccatgtcagcgatatacgtgccgacgcctgaatcaatcaggacgttgttaaaagcgccgccggctccgatcacaagcagaatggaagcaatcggtcccagacagtcattgctgaattttaaaatgctttctctgtcaaagccctgataaaaaccaaggctgaaaaaggagtaaaccgtggcgatcaaaagcgctgtgacagggtcgccgataaatttaaaagtttcatagagcgtgcttttttccggaagcgcaatttcggcaagcgttgccataagcatcaggatcaccggtaccaatatcgtaaacaatgtatttgcgaatcccggaagcttgcgtttttcattccgttcaataaattgttttttcaacagttcgggaacgggtttatgaatgcgcttaccaatccattttccgtaaagcggcccggcgatgatggcagtcggaatgccgacgattaaagaaaacaaaatcgtttttccgacattggcgtgataaatgccgacagctgccatcgccgccgggtggggcggaaccaatccgtgcacgacggaaagtcccgcaaggagcggaatcccgatcgtcactaatgaaaccccggtttcaattgcaatcgtaaacaaaagcggcacgagcaggacaaagccgacctggaaaaagaccgggatgccgacgataaaagcgacggccatcatcgcccaatgcactttctttttgccgaagcggccgatcagggtgtgggcgatacgctccgcaccgcctgattcagccatcatttttccgagcatcgtaccgagggccagcacgatcgcaagcagcgacagcgtattgccgagcccggttttcatcgaagcgataatgtccggcagattcatgcccgttgcgaaaccgacaaggatggatgtaatcagcagactgataaacggatttaatttagcgaccgtaatcaataagagtaaaacgataatagcggcaatgacaataaacagtaacatgaccttttcaccctttcaaagaagaattaacggctttgtttgagctgaaattcactgatgacgtcaaattcatctttgagcttgtcatacagccgctcgtataagtaaaacagctcaatatatgtttcgctgtttttgacgttcggttcatggcggtgagaaattctgatccagtcttgaacatcctcgatccgttccatttcgccaaggctgtgcaaagcgagaacggccgctccgagcgccgaggcttcgtaactttccggaacgaggacttcccgtcccatcgtatcggacaaaatctgcctccaaagcggtgatctcgcaaatcctcccgaagcccgcacgtcttttgcagggcccgccaaatctctcagtgcgacaccgattgaaaagacgctcatgatgacgccttccagcaccgctctgataaaatgctcccgtttatggcggaggctgatgccgaaaaacgttccgcgggcattcggattccaaaacggcgcgcgctcccctgataaaaacggcagaaacagcaatccctcagagcctgcgggcactttatcagcgatatcaatcattaaatcatacggatcaatgccgagccgcttcgccgtttcgacttccggagaagcgaattcgtctcgaagccagcgcagcataatgcctccgttattcgtcgggcctccgatgacccaatgcttgtcagtcagcgcgtaacagaatgtccgcgctttttcatccgtaatcggcgcatccgtcaccgaacgcacggctccgcttgttccgatcgtaacggccacttcgcctttgccgatcgcgccgactccaaggttggcgagcacgccgtcatttgcgccgataataaacggtgtatccgcatgaatgcccatccgtgcagcgatttccggcgcaaggccgcgcagctgatgagtggtcggcacgatgtccgacagctgatcttcccggattccggcaatccggagcgcttcttcatcccaggaaagcgtatctaaacggaacagccccgttgccgaagcgatcgaataatcgacgacataagttccgaaaaactcgtgcagaatatattctttaatactgatgaatttggcggttttcgcgaatgtctccttgtcctgttctttcatccacacaattttggaaagcggagacatcgggtgaatcggcgtacccgttcttttataaatatcaaaaccgttcatctcttttaaaatccgttttgattgctcggcgctgcggttgtccgcccaaatgatgcttttggtcagcaggccgccgttttgatcgacagctatcaatgagtgcatggcggtgctgatgccgattgcaagcagattgtcagggctcagtccggcctttgtgacggcgtccctgatgcttccgatcaccgcttccaaaatgtgctcaggatcctgctcggcccatgccggctttggctgtattaaatcatagtgaaccgaatgcttggctaacactttgcctcttggtccgaacagaacggctttcgtactggtcgtgccgatatccagaccgataacagcttgggtttccttcataatatatcccgcctaatctgattgaataataagatagattgataatgtatgcccttacaaagtcaattataggaataatttttttataaatcaacgatgaagaagaaaaattttttcataaaattgcctcaattcccactgtatcggcattttctcttttgaaaaataaatattacaaacgtttgtgcgcgatcatttttctgatttgctgcaagttggcgagcgttttctcctgccgcagccgggccgtggcgaaatacagtgtatcaatgactgacagctgggcaagccttgcggacatcgcttccgttctgaaagccgtctcccttgttgacgtatacagcaccacgtcggaaatctgggtgagcggcgacttttggtagcttgtaatgccgatcgtgccggcgccgagcgatttggccgttttcaccgcgtcgagcacgtccttgttgcttcccgaatgagaaatgccgatgactgcgctatcgggaccgagaagacccgctgacatcgcctgaaagtgagaatccgtgtgcgcgatgcaatttatacccgtacgcataaatttatgatacgcgtctgtggcgatcagcccggaaccgccgtttccgtaaaattcgattctgtctgcgcggtggatcatttctaccgctttttcaacgtcggccggatctaataaatgaaaggtatcggtcagaccggaaatgtttgtgcggaaaactttctggatgatgacttcgatatcgtcgtcggggctcatttcttcatgaatgtgctgcaccggctcctgaacgatctcctgagcaagcgcgatttttaaatcctgatagccggaaaaaccgagccgtttgcacagcctgaaaatcgtcgcttcagagcttttcgttttttccgccagctgaatgatggaaaggtgaatcacgtctttcggttccttcacgatatggtctgcaatcgctctcaattttggcgacaaacctttgctggccgcctgaatcttcccgatgctgcttgaattcacaggggtcatgctataacctccctactcgaatgtaaacgcatacttttatgataaagcaagttctgtcataagggaatcaggttttgttttctttaccgcaaatgaaagaaaagagaaaagtatatcggggacatcgcctcaatgacacttcatccatccgatttttacaaaaagtgatcgttctctgaaaagtgccggtgcccaagtcgccggccataagttaaactcatgatggtaagccgccctgttacagtccagtttctagtgagttgccagcgcttgaaattccagatgaatttcttcaaattagtgttccgccattagcagtcagttctttattaactggattgatcaaaagagaacgatcactaagcaggagaacacttgagaagcacagtctaatcagcttctggagaaaaacttcaaattaatataataatctaattgctctgaaacgcgtaccatacattatactttcaatgatttttaaactctgaggaggaaattcacatgaaagtaattgcaattgacttagatggcacgctgttatcagagaacttaactatccaagaacaagatgtaagagctttaaagcttggacaaaaacaaggtcatcttgtaaccatcgctacagggagagctttatttgatgcaaaacacatcatccataaatatgatttcgattttccgattattgcttcaaacggcgctcaaattgatgtgggaaatcaggtaatattcgaacattttatggattcagatgtaatccaacctatcatcacatggttaaataaagaggaaatctattatcagctttacttatctgacaaaattgccgtatcaaatcaaggaattcagcagcttgaaaaagaactttacaatacagtaatggaagaacctcattttaatcaagaagtattttggaattctattaaagctcaaatccatcaatacgggttagaggaaataccgggtacaattgaccctatcgattatcggtatgtcataaaatgtatgatcgtttcgccaaaccaaagaaaattaaaaaaagctaaagaatattttggacaactgaaggagtgtgccgtaacgagttcaggagcattcaatcttgaaatcacaagtgcaggagtagataaaggagcgtcattaaataaactttgtgaacattatggaacggatgcgcggaatgcaatcgcaataggtgataatttaaatgatctgcctatgtttcaggcagcaggaatagggatagccatgggaaatgcagataagaagcttattcaattggctgcttttaaaacgttatcgaatgatgagtgtggtgtatcttatgcttttgatcattacattctgacgaaagaagaagaccctaaaccgcggagtatacagccatgagccattttgtgaaaagatgtttaatctatattgttggattgtttattttatccgtaggggttgtatgtatgattaaatctaataccgggatcgccccctgggatgctctaaacgtggctttatcagaactcattggccttacaatcgggtcatgggtcttcattgtcggaggaatccttatctttataaacagcctcataaaaatgcggtttcctaatctagccggttttattccgatttttattattggaagttttgttgaccttttaaacttaaaggttctttcgttcttaaaaacagatgctgtaattcttcaatggattttatttttgatagggttgtgtatattggctatgggaatcgctatttatttaagagcatcttttccttcgataccgaatgatgaattaatgttggctattactgaacgcacaggttggggtattaatattacaaagacgataggggaagctttagcttttgtgcttgcaatcattcttcaggggccgattgggataggaaccatcattgtgctgctatgtctggggatattagtaggtttatttgacaaactattacacaagatggggaagccccgttctatttatagtgtgggacaggaaggcgcacatattcatgcaggccatgataaaactattaattaaatgctttttttccccttgtgttattcagtgtgaaatcctgataacgctgtctaagaaggagtaacagtaatgacaaacattacagagatagcaaagaaagcgaacgtttcccggacaacagtttctagagttctcaataatcatccttatgtaaaacctgagaagcgggacgctgtgttaaaagctatgaaggaattaaattatgtaccaaatttcaacgcgattaacctatccagggggaagacaaatgtattcggagtcattgttcctaaaatcaaccatccgtttttcagtaaactgattgccggaataggcgaagagtgtaataaacataattacagtttgcttgtgcaccaatcaaataacgatcctgaacaagaaatggagttttttaacagactgaaatacaaacttattgacggtcttattttgggatcctgtgtaagcccccctcacgtactcgacgagatatctgggtttggcaatattgtttcctgtgaagcttctgcaagcaaacaggttgcacatatatttattaatcatgagtcaggaatcaaaatggcaattgatcatctgcgaaatcaaggacatcaatccattggtctgtgtataggaaatcctaagagcggtgttggcataagcagaaaaaaatcattttttcactttcaaaatgaatacggattaaaatggagtgataattggtactttgaggaacagtacactattgagaatggtatagaaatagcaaaattattactaaataagtcacctcgtcctgaggcaatggttgtaggaagtgattatgttgcggcagggatcatttatgaagcgaaaagacagggaatacgaatacctgaagaaatggcgattataggatttgataatcagccgatatctaaggtaatagaactttcaacgatacatcaaccgattaaagagttgggacaaacagcagcaaatttattatataacttaatgaataacaaagatgtccccaatataaataagttgaacctaaaacttattaaaagaaagtcaacttaaaaagaccactttatggtggtcttttttgcttagcgcagaatcagttctggggcaggcgctttgaaatgagctctttttttcgtttcatctataaaactgaagggcttcatggaaaggttttcaagttcatttaggaagtgacaagcttttaatggtacaaatgatgtcatattccatacaactttctcattaaaacctatagcacgaatattatgcataagccgatcaattgtgtaagaccctgctgctacatacccttttccttgataccacagattattcccttcaattttctccagtgattggccgcacatggaatctgtgtcaatgcgatctgtcattgctataatacccttagagccaacaagttctacaacccgccttgcaacttctaagtctacatgttcactatcaaaattcatacaaatggttaatagaccttctttcgcggctctcatcaaagtaccgggaacttctccgacaagtgtgtttatattatctatgttccatttatctaaccgagcatcttttaacccctctaatctatgtactctttcttggggtgttctccaggtgtgtttaaaattgttcggcatatcattaaacaaatgatctgttaaaacggcatctgatccagtgtaattgctgcgtttttgcgctgtatctataactttcattataagttcagaggtttcctccgggtatgctttttggaagtgacccagcgccggttttactccagcctccacaagtgtatctacaatccattctaaactcggatgttcttcggtaatatatttctttagataggagttttcagtcatagcatctggggacagtacagtataaataagaccgtattctccgcaagaagcgatcttttcccattcttcttttaagggtgcccaattccctttttccggtgtgcctgcaaagctggccaataatggtccttctagtgaaatacctaaaatattacggtaacgtccctttctcttttgtgtatggaactctttcataaaggctgcaaattgatctaattgattatgaggaagaaaaatagagggtacacagaaaatcccttctatttcagctagtgtattgatcttttcaatatctaattgatctaaattgctaaaatcatagtgaccgattccatgacaatgaaattctactggaagagatggaactaaataagaacctgatttcttaaaaattccttctcctccaatgtcgaagttcagccattcgttattactataggttatatcagcgattttcattactccatttgtttcaaggtaagctgggctgttaaatgatgtgctggactgcataggaaactcctcctggaaatatttatttagtattcagtgaagacacatcatcatcttaaagtgtgaaacccgtaccatatcaaccctttattatcatttttgtaaaaaaataggtgtatcattcatctttctacacctgattttctcgttattgttatttgtatcctgaaaatctcctttaaaaactcaaaaacactagctgtaacgccactaatgtttctatacagtttcgtgttacgccaactagtgttctccacgagtttaatttatggaattggtttcatgtcaatagctttaataaatggaatatgacttccgggtatagaaccttgcggagtcattggagttgaactattagaaatgaaatgtgtacagttactaagctgggataccagcataggagtaaaacctttcatatttctgctaactttttgccgctcagtccatatatcgtagaaaacctttcgtcggaatttctgtttgaacaatatatataaagtgctgattacgccatattaggggccggctcaccccgcatatgaatataaacatgttcagtcaaaatgtcttatataggtgataagaaaaccagcggcaaaaattagtattgactttgaaaatagaagactgtatattatgttactatattcagaaaataaaaacccaagagattcatttaacataaaacactgtgaacgggagcagtaaaagaatccagtcagaaaaagagagccgcgggttggtgcaacgcggactgattgttctttgaactcgcccggaagtggcagggcggaacggaattgtcggaatattccctatgtcctaacggctgaccttcgttaaaaggtttttaagctggattccggatattcgggatcaacaagagtggtaccgcggctgcctgaggcacgccgtctcttttcccaaagaggcggcgtgcttttttatgtgatgaacactttttgcgagagggcgtgtgatagatggaaaaggaaaagcaaacgttaaaacggacgatgtcgtccagacacattatgatgatggcgcttggaggcgcaatcggggccgggctctttaaaggcagcagcacggcgattgatgaagcgggaccatccgtgttattggcctacctcctcggcggaatcattctgctgtttattatgcaggggctggccgaaatggcagtcagaaacaaacatgcaaggacgttccgtgatttggttcagcagtctctcgggtcgtacgctgcatactttttagactggatctattggaaaatgtgggtgctcaatattgccgctgaggcggtcgtagccgccattttcattcaatattggctgccggaatgtccgatatggatattggctttgatcatttccatcgtggtgacggtcgtaaacatgctttctgtgaaactgtttgccgagacggagtactggctcgcgctcattaaaatcacagtgattgtcatctttattttatgcgggattctgctattatttttctcattcggcaatcacacggcgccggggctgtctcatttaacggatcacggagggtttttcccgcatggagcggggggcgtcattacggcgatgctcgtcgtgatctactcatacggcggaacggaaatcatcggcgtcacgctggcggagacaaaaaatcccgaaaaggtgatcccgaaagctgtccgaagcacgttaacgcggattgtcgctttttacttgctgccgtttttcatcatcgtcagcctgattccttggaatcaagtcaacagcgttccggaaagcccgtttgtcatagtatttaagatgatcgggattccgggtgccgaccatattatgaatgccgtcattcttcttgcgattatctcgtctatgaactcgggactgtacggatcatcccgcgtcttgtttacgcaggcttctgacggccgggtgccgaaaatcttttcaaaactgtcgaagaaaaaggttcccgtttatgcgattctgacttgtacgtcatttttatatgtaggcgttctgatttcattattcgcaggaagccagacgtttaattatttgatgggttccctcggctataccgtgctgttcatctggctgattatcggattcgcccatttgaaatcaagaaaacattcaacagaacagccggcttattacgtcaaatggttcccgtacacgacatggttcgcagtgcttgcgcttttggccatcttggtcggcgtgattgccacgacatccatcgtcatcacatgcatcactgcggccatctatctcctcattacggctgcgtatctcgtgaaagggagacgtcaataaataaaaaaactcttgccccgcggcaagagtttttttaatgaacggcctttttttctgcggccagagcaggtgttttcagtttcttcggtgttatattcacaaaacaaatgcttgtgacgatcagaagcagtccggctaaaaggctgacggtcagcggctcatgcaggaatatcgagctgacggtaatggatatgagcgggatcaggaaggtgtaagaggcaaccttgcttgcttcccctgaaccgacaagcgtaaaaaaggcgagccagccgagcgcgataacaaaaactgaaatgaacagaaggctcagaatgaacggagctttccattgaatcgctgaaaagctttctgaaaaatggccagagctgacaagcagcacgccgccgatcagaagctgaagagcgaccatccagatagagtccgcgcgtccgcccgttcttttcacatataccgtgccgagcgcccagctgaccgcggagcctaaggccaaaagaatgccggcgatggaaatatggcctccgaaaccggctgcgctgatgacggcgacaccggcaaagcccagaataagaccggctatttttaaaggatacatcgattccccgagccacacccaagaaaaaacgcccattaaaaccggctggaaaaacacgatggctgaaaataagccggcaggcaggtaattcaagccgaccgtttgcaggccgtaaaataaagtaatatttaaaatggcagaaataagatagatcggccacgtttctttaaaacgcagctttttaaaacggggcagcgccgccattaataatagaagtccgccgatcagcgtgcggattccggcaaacagaagaggcggcgaataggcaagcgcggcctttgtcagcggccagttaattccccataccgtgactagaaacgccagcataagagccgtctgtattttcgaaagctgtttcacgtcgttcactccttgtagaacaattccatcatatgatacggtaatcagtaagataaataaaatgaatcttttttataaggagcataagtaaaacgttatgacgattacacaactgcgggtttttgttcaaatcgctgaaacgggaagctttacaaaagcggggcaggcgctgaatatgacgcagcccgccgtcagccatgccatctctgcgcttgagtcagagctcggcatcaagctgatcgtccgcgagcgccgcaacggcgtaaggctcacggacacgggcggaaaaattctcgtccatatcagagaggtgctcaaaggcatagaaaaagccgagcagctggcggcagcggaaagagggcttgaacagggaacgattcacatcggcacatttccggccgcttccgcttatttcattccaaagctgatcagcgtgtttaaaaaacggtatccgaagcttgagttggtgctgcatgaaggaacggttaacgaagtaaaggaatggctccgctcccgggtaatagatgtgggtatcactctttttcctacggaagacatggaatatctgccgctgaaaaaagataaaatggccgtcgtgcttagaaatgatcacccgctttgcagctgtgagtcaatcactctgaaagatcttgaccgccagccgatgatcatctgtgacggaggatacgaatcaccgtttattgatatgtttaaggaggcaggatctgtacttactgccgcattcactgtttacaacgtcaatacgtccatcagcatgatcaaagaggggctgggaattgcgatattatcacaaatgtctatgtcgggaatatcgctgccggaaaatgtcgtgacaaggggactcaatcaggcggtgtaccgtgatgttctgcttgccgttccttctataaaggaggcttcattggcggcaaaactttttattcaaatcgcacaggaactcacaaagaatgaataaaaaaagatcctaatcatcatagggtcctgaatcttatcggttaattttaaaagagttagtcgtattgacaagttttgaaccgctgaacgtagctttgacacgataataacctgtcttgcatccttttaaagagaatgacttagtcacccttactgagaaagaaaaggttgtttttttacaagtcgtccatttctttccggactttcgctgtaaatataggtttcctttaaaagttcgatctgacggatacgctgtactgagagtaaaatcgacacttttcgcttttttagtgtagtaggaggcatcggtaaacccgcttacatttaaatgctgctgagtgccggagtaaaagtctgcagcatatgccttatcggtgtttcctgtaaagaagattgctgccagtaaagctgttgtgagtgccattaagatttttttacgcatatagacaatgacttccttcctattcaatatcatacatatcttaacattattgggtttgttctttcaacgatagattttcacttttataggatgaaaagctcatcatatctgaatgtaatagattcattcataaagagttcactagtgacgaccgctgactgattgttcgaaaatcatcgaatcaaattgtttaactcacgggaaaagctgtggtaaggtgtgtggtagagaccttgtttaagatctgcttacactaaaccataaaggagaaaacgatggctgaacatacattgaaagatactgcgttttccgtgttgaatttatcgccggtcgtacaggggggaacggttgctgaatcgttccgcaacagcatggatttagcgcgccgcgccgaggagtggggctataaccgctattggcttgcggagcatcataatatagaaggcgtcgccagctcggcaacggcggtgctgatcggccacatcgccggcggcacgaaaaaaatccgcgtcggttctggggggattatgctgccgaatcattcttcacttgtgatcgcggagcagttcggaacccttgaaacgttatatccggggcggattgatctggggctcggacgcgcgccggggaccgaccaattaacggcgagagccttacgaagaaacataaacagcggggaagattttccggagcagcttgaagaattgagaaattacttcaaaccgacaggcaatgtgcgcaatcaagtccgcgccattccgggcgaagggctggacgtgccgatctggcttttgggctcaagcggcttcagcgcgcgtcttgcgggagagctcgggcttccgttcgcctttgcggctcacttctcaccgaaaaataccgtgcccgctcttgaactgtaccgcagctccttccgtccgtcagacgtactggatcaaccgtacgcgatggtcggcgtcaccgtcattgccgccgatacggatgaaaaggcggagcatctggcaacatcgcattatcaaagatttttagacctcgtccgcggcacgccgaaccagctgaagcctcctgttgaagacatggatcaaatctggtcgccgtatgaaaaagcgatggttaatgatcagctcagttcaacgatcgtcggcggaccggagcgtgtgaaggaaaagctggaaagcttcatccggacaacacaggcggatgaaatcatggtgaattcagaaagctttgagcatgccgacagaatgagatcatttgaaatcatcgccgaattaaaaaacagctgagcaaaaaaagcaatgtgccgcgcacattgctttttttattcgccgatccgcttgactgaattccggatgacgagttccggttcatacacgacgtcatccttcttcggctttttatgttctaagcagtcgatgacgtattttgccgccgctttccccataatggatttcggatgcttgacagaggtgagcttcacctcggaaatctgggcgaaatgtgaatcgtcatagcccatgaccgatacgtcatcaggcacctttaaccccaattccctgagaagattaatcgtcttcagcgcaatttcgtcattgtagcaaagaatggccgtcggatatgacccgctgttttgctcaagggtatgcttaatcttttggagaagcacggtttctttttcttcagtcgtgtaggttacgatcatgtccggagacgggaaaatcccgcgctcccgatgcgcctgaagatagccgttcatccgtttgacgccctgcgtgtcatccgctttaaagattcccataatgtgcgtgtgtccgagggacatgacgtattcgcaagccatcatgccgcctttgacatcattgacggaaaagctcggtgcggccagctccgcataagaggcgttaatcatggcaaacggaatgccgtttttctccagattgagatagtagccgatgttgggcgtctgcagcgcgctttttgtaggctcgacaatcagcccgtctatatttttggacagcaggttttcaaggccgcgccgctcactttctgtattgttgttggtgctcgtcagcagcatggaatagccctgttcgcttaaataagattcaattcccctgatgatgctcggaaaaatatagtctgatatgtacgttgtaatgacgccgatcgttttgtttgaatgcatggctgatttcgccgtgcgtgaagcgacaaaggtgcccccgccctgaacgctgtacagcagcccctgcgagaccaaatctccgatcgcctttctgatggtatggcggctgacgccgaactgctgcatcagctcattttccgtaggcagcttttcgtccggctgtatttttccttgattcagccatgaacaaatttcttcttttacttgagcatatttcggtagcatatcaattcctccaaaatgtatacggacaaattccagtataacatagtaagccctttcatcaagctgtaaaaataattgacagattatgaaaaactgcttattctttatttgtacgtactaattttcctcatttttagataaaattcttcataagtacgtacaaatgtggcggttctgaagaaaacaaagcatcatcaagcgccgcactttgttttgtaagcgtttttattctattattcgcgggagggtaaaattcatgaagaatcacccggcaccaattggctcaaatgtacctgtcactcggcagcattccaagtggtttgtcattctcatctcatgcgcggccggactgggagggcttttgtacggttatgacacggcggtgatttccggcgccatcggtttcctgaaagatttgtaccgcttaagtccttttatggaagggctcgtgatttcgagcattatgatcggcggtgtattcggcgtcgggatttccggatttttgagcgaccgtttcggacggagaaagattttgatggcagcggcgctgttgtttgcggtgtcagcggttgtctctgcgctttctcaaagtgtgtcttccttagtgatcgccagagtcatcggcggtctgggaatcggcatgggctcctcgctttctgtcacgtatattaccgaagccgctccgccggccatacgcggcagtctgtcttcactgtatcagctgtttacgatattagggatatccggcacttattttattaaccttgccgtccagcagtccggctcgtatgaatggggggtgcacaccggctggcggtggatgctcgcttacggcatgattccgtccgtcatcttttttatcgtgctgcttatcgtgccggaaagtccgcgctggcttgcgaaagcggggcgccggaatgaagcccttgccgtgctgacgcgcattaacggcgagcagaccgcgaaagaagaaatcaaacaaatcgaaacgtctttacaattagaaaaaatggggtcattgtctcagctgtttaaaccggggctgagaaaagcgcttgtgatcgggattctgctggctttattcaatcaggtcatcggcatgaacgcaattacgtattacgggccggaaattttcaaaatgatgggctttggacagaatgcggggtttatcacgacatgcatcgtcggtgtcgttgaagtgattttcaccattatcgcggttcttttagtcgataaggtaggccggaaaaagctgatgggggtcggatctgcctttatggcgctgttcatgatcttaatcggggcatccttttattttcagctggcgagcggtccggctttagttgtcatcatattgggattcgttgccgctttctgtgtatcagtcgggccgattacgtggatcatgatttcggaaatctttccgaaccacctccgcgcacgcgccgccggtattgcgacgatattcttatggggggccaactgggcgatcggccagttcgtgccgatgatgatcagcgggttagggctcgcgtacaccttctggatattcgccgtcattaatattctctgtttcttgtttgtcgtgacgatctgccctgagacgaaaaataaatcattagaagaaatagaaaaactctggataaaatgaaagcgttttacgacaaaagtccgctccggcgggcttttgtctgtcaccttcattccgtttctgtatataatgactgtatcaaggagatactggaaaatcctgcgaagaatgtcgaggaattgacctttaacagttgaattaacaatgtcatcctgttaaaataattaaagaaagcagacataattttttttggctatgatgggacgttttttgtcatagcgggacattttctgtccagtatgaataggaaggaacgtttgagtcatgaaccagttaatacaagctcaaaaaaaattattgcctgatcttttgcttgtgatgcagaaaagatttgaaatcttgcagtatatcaggcttaccgaaccgatcggccgcagaagtcttgcagccagcctcggattgaccgagcgcgttctcagaagcgaggttcagtttttgaaagaacagaatctcatcgatattaaaacaaacggcatgacaatgacggaagagggctattcactgctttcgattctggaagatacgatgaaggatgttttaggattgacgcttttggaaaagacattaaaagagcggctcaatctgaaagacgccattatcgtttccggagacagcgaccaatctccttgggtcaaaaaagaattagggagagcggccgttgcatgtatgaaaaagagattttcaggcaaaaatatcgtcgctgtaaccggcggtacgacaattgaagccgtcgccgatatgatgacgccggattcaaaaaaccgcgagctcctgtttgtgcccgcaagaggcggtttaggcgaagatgtgaaaaaccaggcgaacaccatatgcgcgcatatggcggaaaaggcttcaggcacttaccggcttttgttcgttcccgggcagctgtcacaaggcgcctactcatctattattgaagagccttccgtaaaagaggtgcttcacacgattaaatcagcgagtatgctcgttcacggaatcggcgaagctagaacaatggcggagcgaagaaacacgcctttggaagatttgaagaaaatagatgacaatcatgcggtgacagaggcattcggctactactttaatgcggacggagaagtcgttcacaaggtgcattcagtcggaatgcagctcgatgacctcgatgccattcccgacattatcgcggtagcgggcggatcatcaaaagcagaagcaatcgaagcttattttaaaaagcagcgaaacacggttctcgtcacggacgaaggagccgcaaagaagttattaagggataacagtccctcaatataaatatctctcacttatttaaaggaggaaataatcatggcagtaaaagtcggtattaacggttttggtcgtattggacgtaacgtattccgcgcagcattaaacaatcctgaagttgaggtagtagcggttaacgatttaacagacgctaacatgcttgctcatcttttacaatatgattccgtacacggaaaattagatgcagaagttaaagttgacggcagcaaccttgttgttaacggcaaaacaatcgaagtttctgctgagcgcgatcctgcgaaactcagctggggcaaacaaggcgttgaaatcgtagttgaatctactggtttcttcacaaaacgcgcagacgctgcgaaacacttagaagcaggcgcgaaaaaagttatcatctctgcacctgctaacgaagaagatatcacaatcgttatgggtgttaacgaagacaaatacgatgcggctaaccaccatgttatctctaacgcatcttgcacaacaaactgccttgcgccgtttgcaaaagtacttaacgacaaattcggcatcaaacgcggtatgatgacaactgttcactcttacacaaacgatcagcaaattcttgatcttccgcacaaagactaccgtcgtgcgcgtgcagcagctgaaaacatcattcctacatcaactggtgctgctaaagcagtttcccttgttcttcctgaactgaaaggcaaactgaacggcggagctatgcgtgtgccgactccaaacgtttctcttgttgacctagttgctgaacttaacaaagacgtaacggctgaagacgtaaacgcagctcttaaagaagcggctgaaggcgatcttaaaggaatccttggctacagcgaagagccattagtatccggagactacaacggcaatgctaactcttctacaatcgatgctctttctacaatggttatggaaggcagcatggtaaaagtaatctcttggtacgataacgaaagcggctactctaaccgcgttgttgaccttgcagcttacatcgcaaaacaaggtctttaattcatagctcccggaaagggccggacttggttctttcggacagaaacgctataatgaaagcggacaagggaaggggacggactccctttccctttttccatgagaaccggctttcagaaagcgccggattgctgcagaacgtccgcgttttgaagtttccgcggcactttcgttttctgagccgcctgccctggctcagaagacgatctgccccgtgcccggaagctgcaatctgccccgcggcggaagcaacatgaggcggtttcacgtttcacgtttttcgtgctatgcaaaccattttgaaggaggatctcctaaggcatgaataaaaaaacagtaaaagacatcgacgtaaaaggcaaagtcgtattctgccgcgttgactttaacgttccaatgaaagacggggaagtaacagacgatactcgtatccgcgctgcgcttccaacaatcaaacaccttgcagaccaaggcgcgaaagtccttcttgcgagccacttaggccgcccgaaaggcgaagtggttgaggagcttcgtttaactcctgtcgctgcacgcttaggcgaactgctcggcaaagaagtgaaaaaagcggatgaagcttacggcgatgctgtaaaagcacaaatttctgatatgaaggacggagacgttcttgtattggaaaacgtacgtttctaccctggtgaagagaaaaacgatcctgagcttgctaaagcatttgctgagcttgcggatgtatatgtcaatgacgcattcggtgctgcccaccgtgctcacgcatctacagccggaattgccgagcatctgccggcggttgcaggattcctgatggaaaaagagcttgatgttctcggcaaagccgtgacaaatcctgagcgcccgtttacggcaatcatcggcggcgcgaaagtaaaagacaaaatcggcgtaatcgaaagtctgcttgataaagtggacaacctgatcatcggcggaggtcttgcttacacattcgtaaaagcgcttggctatgaagtcggtaaatctcttcttgaagaagataaaatcgaacttgcaaaatcattcatggaccgcgcgaaagaaaaaggcgttaaattctatatgccggaagacgttctcgttgctgatgatttctctaacgatgcaaacgttcaaatcgtgccgatctctgagatcccaagtgatttagaagcgatcgacatcggaacgaaaacccgcgaaacgtatgctgaagttatcaaaaacagcaaacttgtcgtatggaacggaccgatgggtgtattcgaaatcgacttgttcgctcaaggcacaaaagcagtggctgaagcattggcagaggcaaacgatacatactctgtcatcggcggaggagactctgcggcagccgttgaaaaattcggccttgctgacaaaatgagccatatctcaacaggcggcggcgcatcccttgaattcatggaaggcaaagagcttccaggtgtagctgcgctgaacgataaataaaaactgctataaggaagtggaacagatgagaaaaccaattatagccggtaactggaaaatgaacaaaacactcggcgaagctgtcagcttcgttgaagaagtgaaatcttccattccagcagcagacaaagcggaagccgttgtttgcgcaccagctcttttcttagaaaagctgacttctgctgttaaaggaactgacctgaaagtcggcgcccaaaacatgcattttgaagaaaacggtgcgttcacaggtgaaatcagcccggtcgctctgaaagaccttggcgtggattactgcgtcatcggccactctgagcgccgtgaaatgttcgctgaaactgatgaaacagttaacaaaaaagcgcatgctgctttcaaacacggcattgtgccgatcatttgcgtaggtgaaacgcttgaagagcgcgaagccggaaaaacaaatgatcttgttgccgatcaagtgaaaaaaggtcttgcgggtctttctgaagagcaagttgccgcttccgttattgcgtacgagccaatctgggcaatcggaacaggcaaatcttctacagcgaaagatgctaacgacgtctgcgcgcatatccgtaaagtcgttgctgaaagcttcagccaggaaactgctgacaagctccgcattcaatacggcggcagcgtaaaacctgcaaatattaaagaatatatggcagagtccgatattgacggtgctttggtcggcggcgcaagccttgaaccgcagtcattcgttcaattattggaggaaggtcaatatgagtaaaaaaccagctgcactcatcattcttgatgggttcggattacgcaatgaaacagtcggaaacgcagtcgcacaagcgaaaaaaccgaatttcgaccgttattggaaccaataccctcatcagacgctgacggcatcaggcgaagcagtcggactgcctgaaggacagatggggaactctgaagtcggtcatttgaatatcggcgcaggacgtattgtgtaccaaagcttaacacgcgtgaacgttgccatccgcgaaggcgaattcgaacgcaatcaaacgttccttgacgccatcaaaaacgcgaaagacaacgacaaagcgctgcacctgttcggccttctttctgacggaggcgtacacagtcatatcaatcatttattcgcgctgctgaagcttgcgaaaagtgaaggactgacgaaggtgtatattcacggtttcctcgacggccgcgatgtaggtccgcaaacagcgaaaacttacattcagcagctgaatgaacagatcgaagaaatcggtgtcggcgaaatcgccagcatttccggacgctactactccatggaccgcgacaaacgctgggaccgtgtggaaaaagcgtaccgcgcaatggcttacggcgaaggcccgtcttaccgcagcgcgatggatgtagtcgacgattcttatgcgaacggcattcatgatgaattcgtcattccgtccgtcatcacaaaagaaaacggtgaacccgttgcgaaaattcatgacggcgattctgtgattttctataatttcagaccagaccgcgccatccagatttcaaacacgtttaccaacaaagatttccgcgatttcgaccgcggtgaaaatcatccgaaaaacctgtatttcgtctgcctgactcacttcagtgaatctgttgacggatatgtggcttttaaaccggtaaaccttgacaatacggtcggtgaagtattagcacagcacgggttaaaacagcttcgcattgcagaaactgaaaagtatccgcacgttacgttctttatgagcggcggccgcgaagaagaattcccgggcgaagagcgcatcctcattaactcgccgaaggtcgcgacatatgacctgaagcctgaaatgagcgcgtatgaagtgaaggatgctcttgtaaaagaaatcgcggctgacaagcacgacgcgatcatcctgaactttgcaaaccctgacatggtcggccactccggaatggtcgaaccgacgattaaagcaattgaagcagtggacgaatgcttaggcgaagtggttgacgccatcatcgctaaaggcggacatgccatcattaccgctgatcacggtaatgcagacattctgattacagaaacaggcgaaccgcacactgcccatacgacaaacccagtccctgtcattgtgacgaaagaaggcgtgacgctgcgcgaaggcggaatcctaggcgacctcgcaccaacgttattagaccttctcggtgttgaaaaaccgaaagaaatgaccggaacatctttaattcaaaaataagcgtaaatcaaaaggagagacaaactcatgccatacattgttgatgtttatgcacgcgaagtccttgactcccgcggcaacccaacagttgaagttgaagtatatacagaaacaggagctttcggccgcgcattagtgccaagcggagcttctacaggtgaatacgaagcggttgagcttcgtgacggcgacaaagaccgttaccttggaaaaggcgtgttaactgctgttaacaacgtaaacgaaatcatttctccagagcttctcggctttgacgtaactgaacaaaacgcaatcgatcagcttttaatcgagcttgacggaactgaaaacaaaggcaaactcggtgcgaacgcaatccttggtgtatctatggcttgtgcgcgcgcagctgctgatttcttacagattcctctttaccaataccttggaggattcaactcaaaaacgcttcctgtaccgatgatgaacatcgtaaacggcggagagcatgctgacaacaacgtagacattcaagaattcatgattatgcctgtaggcgcgcctaacttccgtgaagcgcttcgcatgggcgctcaaatcttccacagcctgaaatcagttctttctgctaaaggaatgaacacagctgtaggtgacgaaggcggattcgctccgaaccttggttctaacgaagaagcgcttcaaacaatcgttgaagcaatcgaaaaagccggcttcaaacctggcgaagaagtgaagcttgctatggatgctgcatcttctgagttctacaacaaagaagacggcaaataccatctgtctggcgaaggcgttgtgaaaacatctgctgaaatggttgactggtacgaagaaatggtttctaaatacccaatcatctctatcgaagacggacttgacgagaacgactgggaaggccacaaacttcttacagagcgtcttggcaaaaaagttcagcttgtcggtgacgaccttttcgttacaaacacgaaaaagcttgctgaaggtatcaaaaacggcgtaggcaactctatcctgatcaaagtaaaccaaatcggtacattgactgaaacattcgatgcgatcgaaatggcgaaacgcgcgggctacactgccgttatctctcaccgttcaggtgaaactgaagacagcacaatcgctgacatcgctgtggcaactaatgcaggacaaatcaaaacaggtgctccgtcccgtacggaccgtgttgcgaaatacaaccagcttcttcgcatcgaagatcagttggctgaaactgctcaataccacggtatcaactctttctataacttgaataagtaatggaatggacgccgggagatattctcccggcgtttttttatgctcccgggtttttccctcctttttcatcatcttcatttggtcaataatattcatttttcccctatttaaaggaatcagtgttcttcaatcgaaagggaagaggtgttaataagaggagggattatgatgaaattttcatttatgtcagccgcggtggcagcaagcgttatatggggcgcgtctgccgggccgctgtctgaaacccatggttattcagccgtgaccgcgccggtttttgatgctgatgaggcattggacactatgcatgatctgagcgaaacaatcggaccgcgggaaaccggaactgcgaaagaaaaggaagcggctgaatacatatcgaatcgcctgcgggctcagggcgccagtgtcaaagtacagacatttccgttgaaaaagtacttttcaggttcagtcacagcgggagatcatgaattcccgctccgctccgctgctcaatccgctgttgaaaaagagctgagaattgagggagggatttttgacggcggctgcggatcacgcgatgacgtaacaggagccaaaggaaagattgcagtgatacgcgaaggaaagatcccggtttctcaaaagatcaaacatgccgaacaagcgggagccaaagcagtcattatttataatcagacaacaaaaccgctcgccgtccgtccgcataccgataaaggaatcacgataccggcggcgggtatgaaaaaagaagacggtgaagcattgctgcaggaaaagcaggcagtcattcaatttaaaaactataaaaaccgcacctcacaaaatattataggaacgcgcaaagcggcacaggccaactcttctgatgctgatattatttatgtcacagcgcattatgacagcgtaaaaggcgcgcccggagcggatgataacgcctcaggcacatctgccgttctggaaatcagcaagcaattcacacacataccgaaagacaaagagatccgctttatcctgttcggtgcagaagaattatggtctgcgggttcatcttattacgtcagtacactcacgaacaatgaaagaaagcacagccaggccaattttaatgccgatatgattgcgactgactgggaagaagcgagtcaaatgtgtgtcacgactcctgacggcagggaaaacccgagcgtccggtacgctgaaaaagccgctgaaaaatcccggttggtcaagccaaagctgattcagctcggttactcagaccatgtctctttttatgaagcggggattccgtcggctaattggatttggctcagccccgatactcaggagccggggccctggtatcacactgagaatgataatatgaaacacatcagcaaagaacgattagagaaagcgggagcactcgtttccgcggctgtaactgaggcagtgacagaataaaaaaacaggcttcggcctgtttttttatattattttctgtatattctctcaattaagggagattttctcactcgttaccagatatataccatttgacaggattttattttacaaataaaagaaaaataaatatataatacctaatttataaaaggatgtaaaactcatttatcaaattttaacttttgttataattgcgatatcgatcgatatttgttttaaattgtaaaaaacaatactcttttctatctattagggggcgaaaaatgaatactgtcacaaaagaagccagcaaccttggtcaaaaacggctgttacatctaattgaaacgaagcaggcgattgtaggcgtgttaggcatgggatatgtgggatttcctcttgctctggaatgtgtcgataaaggatacaatgttatcggattcgacaaaaacagtgaaaaggtttccttgttagccgccggaagcagccatattcaagatatagaggacgacagactgaactcggctttacaaacaaaacgctttcaaatcagcgccgacatgtcactcatccaaaaatgcgacatcattgtgatatgtgtgtcgacacccctgaacaaaaaagacaagatccccgatttaacctacatcgacagtgcagttgacagcatgatcgcttatggaaggcagcatcagcttttaattttagaaagcaccacctatcccggaacaacgaaaaaaaagattgccgacagaatggcatcaagccgcggcatgaaaataggaacagacttttttacggcttattctccggaaagaatcgatccgggcaacaggcaatatgaagtttcagatattcctaaagtagtcggcggaaccacacagacttgcacagaacttgcctcagcgttttacagcaccattgttacaagcattcacccggtcacctcacccgaagtagctgaaacagctaaactcctagagaatacttatcgttatgtcaatatagctcttatcaatgaaatggcgcttaattgccgtgaacttgatattgatatatgggaagtcatctgcgcggcggacacgaagccgttcggctttcaaaaatttatcccgggccccggagtcggaggccattgtatcccgattgaccctttttacttcaaatggatcgcgaatgaaaaagggctgcagacaaaattaattgacctggcggacgaaatcaattccaatatgccgatttctgtctctgactatgctttgaaactgtcgggcaaagacaaatgcagcatcttaataataggggccgcttataaaaaaaatacaaatgacccgcgtgaatcctcagtgtttacgataatggaagaattgatggacaagggatgcgcgattgattatcatgatccgtttatcagcgagatccgcttgaatgacggaagccgcaaacaatctgtccctttcacaaaagaacaaatcaatcagtacgacgtcatcatcattcatacagatcacgatgtcatcgactacagtattttgaaggatgtctcaccgattatctttgacacaagaaatgtatgtaaggaaaaatcagccgacaattgcagagttgtcactttataggagggaacggtcattagtaatcgatttatctcttttcacagacctgatatgacaaacgaagaaatcgcaagcgtaaccgaaacgattcaatcgggctggatttcgaaaggcccgaaggtaatcgattttgaaaaaaagctgggagaatgtataggagccgaacacgtcatcagctgtaattcaggcaccgctgcattacatatggctttattggcgctcggtgtgggagaaggcgatgaagtcatcgtgccgagcttcacgttctgttccagtgtcaatgtcatcctgcacgccggagccgttccggtgtttgcagatatatgcgagaaaagtctatgtgccgatcctgaagatgtcaggaagaaaataacgccgcgcacaaaagcggtaattgcggttcattttgccggctatccggctgatctggaaaacttgcaatccatttgtaaagaaaacggattgtatctgattgaagacgccgctcatgcgctcggtacaaaatataacggaagcatgatcggcactcacggcgatgctgtgtgcttcagcttttatgccaccaaaaatattacaacgggggaaggcggagccctcgtcatgaaagacgaacaggccgcagaaagagcgaggctgtacggctggcacggcatcacaaaaaatgcctggaaccggtacggtgaaaaaggcagctggagatacgacgttttactgccgggctttaaatataatatgacggatattcaggccgcgctcggtctggttcaattgaaacgcgcaaacgaaattcaagaaaaacgggaacagatcgctcaattttatgtacgtgaactgtcgggccaatctgacaaagcggcgcttccgctttctgacattccaagcggcataacgcactcatggcatttatttattttacgtattcgagaaaacggcggtatggacagagatctgtttattgagaaaatgaaagaaaaacaaatcgggctgagcgtgcactttattcccgtgcatttgcatccttactataaaaaacattttcctgccgagcttccggtaactgaacgtgttttccgggagatcgtatcactgcctctttacagccagttatcagatgaggattgcagctatattgtcaagtctataaaagaagttttgactatcagccaggaggttggatcatgaaacatattgcgattatcggaggagccggttttatcggaagcgaactggcggcattattacaggctaagggttatcacaccatcattgcagaccaaaaggagccggcttttgacactgaataccgccaaacggatattcttgaccggacgtccctacgcgaatcactgcggggagcggatgcggttgtccatttggcggcaatggtcggagtggacagctgccgaagcaatgaagaagacgtcatacgggtcaattttgaaggaacgaaaaacgtcactgaggtatgcggtgaattgggaatcagcacacttcttttctcatcgagttcagaagtgttcggagattcacctgattttccttataccgagacaagcagaaagcttccgaaatcggcttacggaaaagccaaactgcaatcagaggaatatttgagagaacaggcttccgacaaacttcatattcgggtcgtccggtactttaatgtatacgggccgaaacagcgcgaggattttgtcatcaacaagtttttcagcctggccgagaatggctctgagctgcctctttacggggacggcggacaaatacgctgcttcagctacatcagtgatatcgtcaccggaacttatctcgctctcgttcatgaaggagccgtctttgaagacttcaatatcgggaacgaccagccgatcacgataaaagaactggctgaaaaagtcaatgtgctctccggcagagagaaggataactatctgtttaaaaagctgggcgaagacggcgtgaggggaaaagacatcgagatttttaaacgggcgccgtcaatcgagaaggcgaaacgtttgctcggttacgctccgaaagtaagtctgaatgaaggcctggagatcattaaaaatgagagacacaagcacaaactttcactttcctaaaaacccggaagtggtcaaatatcctgtttatcccggacagctttccgtcaggggccgtctgcgcgcggtgaaacacttgcttactgccggacaaagcggactgactgaaaaactggaaaaacgttacgggaaagggattgtgctgacctccagcggcagtgcggcactggtgctcgcattaacttattcgggagccgggccggggaaagaagtgattttctcatccttcagctgcccgaatgtcattgatgccgtgctgcaatccggtgcgtcgcctgtgtttgcgcagctggatgagcatctatccttatcgtttgaggatgtcaaaaaaaaagtgacaaggcagacgtgtgcggttatcctcacgcatgtatacggccggagagaaaataccgctatcattgactgggcgaaggaaaagggaattgctgtcattgatgatgccgctcaagccatgtttacaaaacaagcggatacatttgccggcggttttggcgatttcggcattttaagcttcggcccctcaaagccgcttgcgagtatcggaggcggcgcgttaatcgcgccgaaagaatggcttcggcaaaaagcaaatctcccgatggaacagcgcagccaagtggcagctgactatcgaatttatatcagaaatcaaagaatccaagctgtaatgaaacggaaacggcatcatcctatttcatatatgtttagaaaagcgggcgccatgccttccatgaaagccacaaagctcgaagctctgccggataaaccggctgttgtacccgtgcttcgcatgcatccggcaagggaagccattattgatgatcagctttcacgtatggatcagcttgtaacagcttcgctccgaaacttagagacggcgggagaaatctttgcaaaggcgggagaaacaaacggcataagaatgatccagccccaagaaggagaacatctgaattatttaacgattgtatttccccgggatgaagagcggtacgggtgttccgtttatttagctgaaagaggcatccaaacatgctggaactatcttcccctcggacgtattccgatttatgaaacatacgcgggggaaggcggggaagacccgctttggaagagagttctttctctgccgtttaaaccccctcttcaaaaggagcaagtcagatatatagccgaatccgttttatcatattatgagcaaaagaataagactgaatagtggtgataactatgcaaaaaacagcagtatacacgacccgccaggcatgggatcgggccgctgacatgtatcaggcgggattgtttcaaagctatgattggggaatcctcatggaagagcttcccggcacgtcatttcaccctgtcagactgacaacggacggaggacaggtcatctatcttccgctttttgaacagaagggcgtattatccggcaatatgatcggatatggcggcgttatttcagatcgccccatctcatttgaatggcttcaaagtgaaattcaggccatattcggccggaacatatcccggatgctgctgccgtacggtcagacttcttttacagaagaaatcggggaagggtggacggaaaaggcaacacggatccttacgcttccggacacgtttgacgaactttggacgggcatttccggaaaagcccggacggcagtcagatacgctgaaaaagagaatattgtcacccggctgatcgggcgaaaagaacttggcgcgttttatgacctctacaaagagcatacgtcggcaatcggcgcggcttatgtgctgagccagggctttttccaaaagctgcttgacacgtttgcggatcgaatgttttgggtcggagcatatcaggatgagacgctgatcagcagcagtatttttctctatgaccgctctcatttctattattggcagaatataaacagcctggcgggaaaaaaagcgcaggcctcttacttattgatgcgtgacgccctgcaattcgccattagccgcaagcttcaatgggctgattttggctattcacacagtaaagaaatcgcaagaccgaaacgatattggggagctgaagaaaaacaatgccgactttttacgaaaccggaatgaaaacaataagcggccatcaatccagttatctgccgtggtacggtttttttgaaaaaatgtataagtcggatctgtttgccattcatgacacagctcaatttgagaaaaaaggatttctcaaccgcaacagaatcaaaacgccgcaaggtcccagatggctgacggtgcctttgcagatgaaacaatataaagacatagagcttcggtatatgaaaatcgaccagacacaggattggcggaaaaaacattggatggcgattaaaatgaactatgcgaaagctccctattttgagcggtaccagcatttttttcaagatgtctatcagcgggagtgggaatatctccatgatttgaatatgcatatcattgaatttttccgagaagagctccgaattgaaacgccgctctgttatgtctctgagcttgaatgccggaaggagaaaaaaagcgattttgttttagcgctttgtcaggagctgggggcggaccgttattattcaggcagtcagggttccgactatttaatagaaagcgattttgaaagaaacggaattgtcattgagtatcagcagatccgacattttggctatcctcaattattcggggagcatatccctcacctctccatgcttgatatgctgatgaactgcggagcggatacagccgaaatgttagtcaaaggagggcaatatgatgaaagtaatggtatttgcagcgcatcccgatgatgaaattatcggcgtcggcggcacgctcgccaaacatgtccgccaaggtgacagcgtgtcggcagtcattatggcggaaggcaagtcatcaagaaaaacggattacaaaaagcctgaagagtccgttatgcagcattctaatcaagaaacggaacaagcgctcagcactttgggcatccatgattttgtcaggctgaaccttcctgataacagaatggattcaatggatttgctggatgtcgtaaaggaagcggagaaacaaatcaatcgttttcagcctgacattgtgtatacccagtacggcggtgacattaatattgaccactccgtcgtattcagagcggtcatgacggcaacccgtccgcttcccggtcatacggtaaaacgggtttttgcctatgaaacattgtcttcgacggaatggaattactgtcagaaggatcagtttcatgccaatttcttcgttaatattgaaaacgagcttgaaacgaaattgaaatcgatggcgtgttacggctccgagctcagagacttccctcatccccgctctttgcaggcgatcgaacataatgcccgtgtgtggggagcaaaatcgggttttaccgctgcggaagcgtttatgcttgtgagaggaacatggtgactgtcctatgattgctcaaattccgtttttcggacttgatccgaagcaaatcgatgagaaatgggtggaagcgggatacggtctggaagcgaatatttttgacggccattcctttggggaagcggattatctcaaaacattcaatcagacgctggaatatgcgaaacagcttgatccttcattattgacgctgcatttcccgacagatcatgccgattatgtgaatgaagatcacatcaaaaaacagctttatcactttgcggagctcgctgtgaaatacggcgccaaaggcataaccgttcatgcgaatcaatttatgacggttgaggaatttcaagtctatgacctggaaggaaaccgtaaaaaaatcgttgagtttttcgcggagtttgatgagcggctgaaagggacggacatttggatcggtgtggaaaaccttccgatcatcgggaatctgggagaggattttgatccgattttcatttatcctgaggattttacagagctggtgcagctggatctgaagcatgtcggtattacgtgggatctgtgccattgggcgattacctatcagactcacttgtcttccgcccttatgttcagaaatgatcagctgaaatatcccgatttctttcagtttctttcgataaaagagagcattaagcattatcacttcagctcatttcgccagcttgcgttcccgcatggcggcgtccgctgttttgagggccgccatccgagtgaagggacgatcgctgaggagctgctgagacgggctgcagatactttgcaggagctttatcggaatcaagataccggcattgtatttgaggtgatggaagaggattatacggaaagacgggaatcatggagaacgctggaatggttcggcggtgtttctgatgacgaggatcaaaaaagggtctgatatgacatatcgaacaccgaactatgcaaagctttggtgtgcacaggtgttttcttcagcggcggacggggtctggctcattgctctgccgctgctagtgctggaattgaccggcagcaaaattcttgtcggcgttatttcttttatcgaactcgtgccgttgacatttggcgtgctggcgggaccgctgattgatttattccgaaaaaagtcgatcttgtatttgtgcaatacgggccgggccgtcatcatgatcctcttggcggtgctcagcgcgaacgatttattaaccgtgtggatagccggggtgtgcgccttttgtctatctctgcaatcgatgctgtttgcgccggcgaaagtcgcgatcattccgctgctcgtccgcaaacagcatcttgatcaggcgacatctctgatcaatacgagtgacttgatcggactcatcgtcggaaaattgatcagcgggatcatgattgcggctattccgttcgggctgctgtttgccataaacggaactgctttttttatctccgcggcgtttatcgcgttcattcgtatttcagaacagcccaatgaaaaaagcaacggaactgaagatgtaaaagccggttacagaatgctgaaaggaaatgcggcatggctgacatcggtcggatactttttcgtcgtaaatctcgtcattgccggccttatttcagtaatggggccgattcttgctgtggagcgttttcagcagaactattctgtatggtttgccgtcatgtattcaatgtttcaggcggggatgcttttgggcaatctggccgtatttttcaaatggaatacaaaacgcttgaaccggctgtacccgcggacgttaacggcagcgggactgctcattatgctcctgttttttccccttcatgggtttgagtgcatcatcttcctggtgcttggcatcatcatctcgtatattgatgtgcaaacggtgctgtatttccaaaagacggttccggccgcatatttcggaagggtctttgcactgattttttccattgtcaaaatgggtgaaccgctgtcggccgctgtctacacagggcttctgctgttgatgaatgcggattatatttttgcggcggtcggactgacccttacgatcgtttttgcttttttttcagtcagacaagggagtcaaagaaatacagagaaacaagcggatcaatccgtctgaatggtaaacgaaggggcgccgatctcagccggcgccctttttatcataaatctaaataaagccgtatcatatcccggcattgaatgccgttttcaaaaatgtcttcatcataatgcctgataaaaaaatcatggtcgacagcctgaatgcggaatccgcatttttgatagagtgacagctgatgaatactggaatttccggtgccgatttcaatcgtgtcagctcccgattgtctcgctttttcaatggcatcttgcaccagctgttttccgaatcccctgttctgcagcgattcttttaccgcgatgtttacgatttcaatcgttttaggccttgtttgcaataaaacgtaaacccctgcaagctcgtctgacgtccaagccgtatagcattctcctcttacaagataatcatcgacaatctccctcgacggatcggccagcagcaatagttcatacagcgcttcatccggctccgcggcttttcggatactcagtttttgcatgtccgtttctcctcctccgttatgatcgacagctattttttcaaaataactccaaaatcattctactttattataaaatatgaaacataggaaaagttatacaagttttgcagattgaataggaggaaagtcatgtttttttgtaagtattgcggccagcagaacaacgaagaggcgcatttctgtaaagaatgcggaaaaccgatcgggaaaggaagccggctggagcggcaggcggctgtaagaacggctgaacctgcttcacaaatgagaaagccgatccctaaaaaaacgctcttcatatggggcggcattgccgcagcgctgatcttattgattgccgcatataaaaccggagcctggctgacatctgaaaaaaggctcacggatcaattcgaacaggcggttcatgacggggacacgaaaaagctcgcagccctgctcactccttcagacaaaaaactgaagctgaatgagaccaatgtcaaaccgctccttgcatacgcaaagaaacacgatgaactgctggcatcgcttcgcggcaattcatcagaaaaagatgcggtatacgtcaaaaaagagggtaaaacccttcttttgtttgaccattacgaattgaaagtcgatccggtttatttccgcgtcaccagcaattataaaggcgccgatctttatatcaacagcgagaaaacaggtacggtcaaaaaagccgatgaaacccaaatcttcggcccgtatgcacccggtgtctacacggcggaagccaagcttaaaaatgagacggttgacgttgtcaaaaaacaagaggcagaggcggccggcagccggaatgttgagtttgacctgccgttagacgccgaggatgtgacattcactccggcagacagcttcaaaagcgcgaaaggcgatctgctgataaacggcaagtccgtccataaagatccgtttacatccgttacatacggtccgctcttaactgacggttccatgacagccgccgtggaggctgattttccttgggggaaaatgaaaactgcggatgtcccgatcaacagcactgatgtggacttaacgcttattccggatcaagatacacaacaaacaatcatggacacgattgtcaaaacaacgaagcagtatacaaaagcgatggcagacggaaataccgatcagatgaccgaggctggttccgcctggaaagagcagacgaaagaagtggtatccggcatgaagagttccggcacctttttgaaggatcagtataaagggacaagttttgatctggattcatttgcgatttctcaagagaacggccgctggcaagtaactgttacgggtaaagagcttcatgagtctgcttatttcgacgggaatacgaagcctgatatggaagaggctgagccgagctttcattatgtactctcatatgatacaaaacataaaaaatgggttttcgaaaaagctgaccctgcctcagattcttctgggacaaatgtaaaaaaaataaaaaacgaccagccgaaaacctatacatcagcatgggcatcttccaaaggaaacacagcttcaggcagcgtgacaaacgagcaagtcacatcgtttatgactgattacctgacaaatcaatcaagcgccgtcagccttaacaattttgccatcatggcgggcaatttagaagaggggagccctttgtatgctgatcagcagaaactggtcaaaaaactgcacagcgaggggacgaccgaagtatttaatgaagtgaatgtcaaaagcttttcacagaaaggctctcatctgacgattcatacgtacgaggagttttatattacgaaagccggcggcagtccgaagctcagaacatacaattggacgtatggcggcgttgttaaagacggaagaatttatttaacatccattcaataaaaaaaacccccgcgccaatcaggcggcgggggtttccgtttttaaaagaagaaataattcatgagttcttttatataatgcttgatcgtgaattgaaacgttacacaaatgatcaaatagatgacgataacagaataaatgatatcggccttagccgtgagctgatgctgatagctcgccagcatgagcggaggcacggcaaacgccgctcctaaaagaccgacagccagaatggtaaagcaaacggttgtatgaagcagcataaaaatgagggcaagaagcaaaatagctgtaaacggaatcaaaaatgccccgaatctggacagcgaatctttaaatgacacctgcgcgccgccggcctttaaagcgataaaaatcaagagatacaggcagaaaacgcataatgcaaaggtaagcgccggtttgatcacaaccgcggtaaaactgatgtcacgaaagccgtctgataggagaatataaaacataatcggcgtcaccaggcagaaaagcaccatgttgctgatgctgctgacaagctgttcgccgcctgtcgttttacatgtttgatacggtcgctttaacacatcaagcacgaataagacaaattgctttgaagcctgcttagccgcggcgccggcctgagcggcctggccttgcgtttggcctgcgcctccctgcccggactggggcgccccgcacttttcacaaaactttccgccatcagtttgatggccgcattgagaacaatacattctaaaactccttttacaagtaatatagggattttgttcaatatttacattataaaagaaaatagggcggatgtaacggagttttctaaagatatacaaatcactttctctatgaattgataatagagaaaaagtacccattatggtagaattttaatgaagttgatggatatcatttctctcggcgcattgattcagagtaaaaaaggaaattaacgcatgctaaaaaaattgaaaatgctttatcggctgttgaaattcggaaaaggcttatggagataacaaacagaaaaaaccgtccttacaaggacggtttttttctgtttccggactgtccggctgaggttataaaaagcagaccccggggtaaaaaccatgcataagaaacagcggagaacaaaacataactcaataacggcaagtcataaggaggtacgcatgttttcattcatcattcatgtcttcatttcactgtttgcagtctccaatcccatcggaaacgtgccgatttttctttcactgacggaagggtactcggagaaagaacggacagcgatcgcgcgcaaggcttccgtgctgtcgtttatcatcttggcggcttttttaatcttcggccatctgatctttaaactgtttgacattaacattcatgccttacgtatcgcgggcggcatttttattttcggtatcgcttataatcttctgaacgcgaagaaatctcatgtacagtcccttcatcatgaagagaaaggggaaagcaaggagaaagccgatatatctgtgacgcctttgtcgattccgattatcgccggacccggtacgatcgcgacggtgatgagtctgtcggccggccatggcggcatcttccattacatcagcgtgcttatcggcattgcggccgtcatcgcgatgacgttcatcttctttcactattcatctttcatcagcaataagctcgggaaaaccgaaatgaacgtcattacccgactgatggggctgattttggcggtggtggcgatcggcatgatcggcgccggtctgaaaggcatgttcccgatcttggtttcctgacttaaaaaagcagcgcccggttatcttcgggtgctgcttttttctattttcggcacatgctgaaacacttcttcactctcaaaaaattctatcaaacggctcagccagtcataataatggagccaatccgtcagttcatccaaaagctgacgggctttttcttcaataccgggactgagattttccgattccagaagctcagtcagctcgcggttcagctttttatagagcattttgtttttgctgaccgcctttgtccaatttgccgtaaacagggagataaacgtctggtaataatcacgctccacgtcataaaggtctttgcgaacgcctttttcaaacactttttcagccagattggcatcggtcatttcgcggaccacctggctcatcctcgttttgctcatcccggttgcctctgacagctcatttaacgtcatcggcttgcggttcatataaataataccgagcacacgtcccagtgtggccggcattccgaatgtatgcatattctcggcgattctctcaatgagatgctcttcagcatgcccgatgatatcaagagcgtttttttccacggctgatcatcccttcactggcttttcatgctgacaatatatcatattttttacagttgatgaaaaagatgatgcggcaggatatgcgagctatcgggagcgattgtaagaacatccgcattgtcagcgggataacatgaaaaaacacgtatattgtatataatttcaacacattgtaaactttttattttacaaatttcatcttataataaagattatacttttcagaaaaataacggaacccttcggaggtgcacggattgctgagattagaaaatgtatcgaaagtctataaaggcggaaaaaaagctgtcaacagcattgatttaaatatcgaaaaaggcgagtttatttgttttatcgggccgagcggctgcggaaaaacgacgacgatgaaaatgattaacagactgattgagccgtcatccggaaagatttttatcgatggcgaaaacattatggagcaggacccggtggagctgagacgaaaaatcggctacgtcattcagcagatcggacttttccctcatatgaccattcagcagaacatttctctcgtgccgaagctgctgaaatggccggaacaaaagcggaaggaacgggcgcgggagcttttgaagctcgtcgatatgggcccggaatatttagaccgctatcctcacgagctgagcggcggacagcagcagagaatcggcgtgctgcgcgcccttgcagccgaaccgcctcttattcttatggatgaaccgttcggagcacttgatccgattacgcgggattcccttcaagaagaattcaaaaaactgcagagaacattgaataaaacgattgtgtttgtaacccacgatatggatgaagccattaagctggctgaccggatcgtcattttaaaagcgggagagatcgttcaggccggcactcctgatgacattctccggaatccggctaatgagtttgtcgaagaatttatcggcaaagaacggttattgcaatcaagaccggatattgaacgcgtcgagcagatgatgaacaaaaagcctgtcaccgttacggcggacaaaacgctttcgcaggcgatacaggtgatgcgggaacaccgtgtcgattccctgctagtcgttgatgacctgaatgtgctgcaaggatatgtggatgtcgaaatcattgatcagaaccggaaaaaagcgagcctcgtcggcgacgtgctccgctctgatctgtatacggtcgagcaggggacactgctgcgcgataccgtacgcaaaattttaaagcgcggaatgaaatatgtacccgtcgttgatgaacaaaggcatttagtcggaattgtcacgcgagcgagccttgtcgacatcgtttacgattcaatctggggcgaggaagaccagctggtgacaggctgacaaggggaggaacgcttacaatgaatgaaatgatcaagtttttgcagacgaacggcggagaactgttatataaaacgtgggagcatttatacatttcgatcatcgccgtcatattaggcattgtcgtcgccgttccgctcggagtggcgctgacgagaatgaaaaagggcgcaggcgccgtcatcggcgccgtcaacattgtgcagaccttgccgagtctcgcgatactggcgttttttatcccgctgttaggcgtgggaaaggtgcctgcgatcgtcgcgctgtttttctattcggtgctgccgattctccggaacacgtataccggcattcaaggcgtaaacaaaaatctgctggaatcgggaaaaggcatcgggatgacggtctgggagcagatcaggcttgtggaactgccgcttgcggttccggtgatcatggcgggcatccgcacatccaccatttatctgatcggctgggcgacgcttgcttcctttatcgggggcggcgggctcggagactatatttttatcggcctgaatctctatcagcctgaatatattatcggcggcgctgtgccggtcaccattttagctattatcattgattatctgctggcggcgacggaacggaaggtgacgccgaaagggctgaaaggactgaaggaagtatcataaggagttggctgttttgaaaagaaaccaaaagagatggatgtgcgcactggcgctgtcagctgctctgcttctaggcggctgttcccttcccggcctgagcggggcttccgatgatacgatcaaaatcggggcgcaaagcatgacggaatcagaaattatcgccaatatgatcgcacagatgatagaacacaatacagacttgaatacggcattaattaaaaacctcggatcgaactatgtccagcagcaggcgatgctcggcggtgaaatcgatatcgccgcgacgcgctactcgggaacggatttaacgagcaccctcggcatggaagcggaaaaagacccgaaaaaagcattatccatcgtccagaaggaatttgagaaacgcttccattacaaatggtttgattcttacggatttgagaacacatacgcttttaccgtcacgaaagaacttgcggaaaaagaccatttagacaaagtgtccgatattaagaagcatgcggatcaatttaagctcggtgtagacaatgcgtggctgaaaagaaaaggcgacggctataaaggctttaccgacacgtacggctttgaattcggcacaacctatccgatgcagatcggacttgtatacgatgccgtgaaaaacgggaaaatggatgccgtcctcgcctattcaacggacggacggattaaagcgtacgatctgaaaattttaaaagacgacaagcagtttttcccgccgtatgactgttcgccggtcattcccgacagcgtgctgaagcagcatcctgaactgaagggcattgtgaataaactgatcggcaaaatcgatacggagacgatgcaggaattgaattacgaggtggacggcaagctgaaagaaccgtccgtcgtcgctaaagaatttttggagaaacatcattattttgaataagaaatgaggtggggcaaatggaagtgctgcagcagctcggcacttattattctcaaaacggcgcctatgtgcttcaggagttttaccgccattttctcatgtcggtatacggcgttttatttgcggcgatcgtcggggttccgctcggcatcttcattgccaggtacagaacattaagcggctgggtattcgcggtgacaaacgtgattcagaccgtgccggcgcttgcgatgcttgcggtgctgatgctcgtcatggggctcggcgccaatacggtgatattgtcgctgtttttatattcgcttcttccgatcatccggaatacgtacacgggaatcgccagcattgaacacgcttatcttgaatcgggaaaagcgatgggcatgaccaaatttcaggtgctccgcatggtggagctgccgcttgcgctttccgtcatcatggcggggctgcggacggcgctcgtcatcgcgatcggcattacggcaatcggaacgtttgtcggcgcgggcggactaggtgacatcattgtcaggggctcaaacgccacgaacggaaccgcgattattttggccggcgccattccgacagcgctgatggccgttatcgcagatcttgtgatggcatggctggagcgggcgctgagtccggtgagaaagaaaaaacgaaccaaagcgccgaatgcggcatgaaaaaaacgccttgcgggtcagggcgtttttttcttatggcttcggaacatgcttgaaaatttcttcgctttcaaaaaactcgatcagacggctgatccagttgtagtaatcaagccaatcctttaattctttcagcagttcgttgattttttcctcagcttcttccggcacgccgttttcaagaacggccgtcagttcgcggttcagctttttatgcatcattttatttttgctgacgaccttgctccatgtggccgtaaacagcgtaataaaggtttggtaataatcctgctcgacgtcgtataaatctttgcggacgcctttttcaaacactttttccgccagattgacgtcaagcatttcacggaccgcctgactcattctcgtcttgctcatgccggtcgcttctgataattcagttaaggtcatcggcttgcggttcatataaataatgcctaaaatgcgccccaccgtcgcgggcattccgaatgtatgcatattttcagcgattcgttctatcaaatgatcttcagcttgttcgattacgtttaagggatctttctccaacagtttcaatcctttcagtcagcaattccgatgtcaatataccacatttttaaaccggcggaaatgctcttccgagagaatttggcagtaatccggagcaataagaagaactttgccggtcaatacgggtaaatcagtgcttacacaacctttatatataatatggacaaattgtaaactttttaatttacaaagtttaatttataatgggaaacgttcaattgtctgaaaagttaaatttgaatttaacgaattgaataaacttaatcatggaggtgtgagtgtttgctgacattagaaaatgtctcgaaaatgtataaaggcgggaaaaaagccgtcaacagcatcaacctgaatatcgccaaaggtgaatttatttgttttatcggaccgagcggctgcggcaaaacgacgacgatgaaaatgatcaaccgcttaattgaacccacagaaggcagaatcctgatagagggccgaaacattatggaacaagacccggtggaactcagaagaagcatcggctatgtcatccagcagatcgggctgtttccgcatatgaccattcagcagaacattaccctcgttccgaagcttttaaagcatcctgccgaaaaacggaaggaacgggcgcgggagcttttaaagctcgttgatatggggcctgaatatttagaccgttaccctcatgaactgagcggaggacagcagcagcgaataggtgtattacgggcacttgccgcagagccgccgctcatcttaatggatgaaccgttcggggcgcttgacccgattacgagagattcccttcaggaagaatttaaaaaactgcaaaaaaccttacataaaaccatcgtatttgttacccatgatatggacgaagccatcaagcttgcggacagaatcgtcattctgaaagcgggagaaatcgtccaggccggaacgcctgatgagattctcagatttccggcgaatgaatttgttgaggagtttatcggcaaggaacggctgatccaatcatccagccctgatattgaacgggtggagcagatcatgaatcccgatcccgtgacggtaacacctgagaaaacactgtcagccgccattcagctgatgcgtgccgagcgggtggattcgctgctcgtcattgatgaaaagaacgttctccaaggttatgtcgatgtggagatgattgaccgcaaacgaagacaggcggtaaccgtcgcggaagtgcttgaacgggatctgtacacggtcagaagcggcactctgcttcgcgacgccgtccataaaattttaaaaagaggcatgaaatttgtgccggtcattgatgaagccggccgtttaacgggaatcgtgacaagggcaagcctcgttgacatcgtctatgactccatctggggagaagagaatcagctcgcggtgatgtcatgaggaggcttcaattgatatgaatcagaccgtgcaatttttacaggcaaatggaggagagatgctttataaaacatgggagcatctgtacatctcattaatcgccgtcatggcgggcattctcgccgccgttccgctcggcgtcctgctgacgaggatgaaaagaggagccggcgccgtcatcggcatcgtcaacatcattcaaaccttgccgagtcttgccattcttgcgttttttattccgcttttaggcgtaggaaaggtcccggccgttgcggcgctgtttttctattccatgctgccgattctcagaaacacgtatacggggattctcggcgtcaatcggcatcttctggaatcgggaaaaggaatcggcatgacggcatgggagcagatcaggcttgtagagctcccgcttgccgctccggtcatcatggcgggcatcaggacgtcttcgatttatttaatcggctgggcgacgctcgcctcctttatcggcggaggcggactcggggattacatttttatcggcttgaacctttatcagccggagtatattatcgcaggcgctgttccggtcacaatgctggcggccgctgtcgattatatgctggggatgacagaacggaaagtcacgcctgacgggctgaagagcataaaggatgcttcataaggaggaggtctctcgtggggaatagatgcaaaaaacggctgctcgcattcgcctgtatcggcatgctgctccttggcggctgttcgcttccgggattgagcgccgcatcggaggataccattaaaatcggcgcgcaaagcatgaccgaatcagaaatcatcgcgagcatgctcgggcagatgatcgaacatcacagcgggttgaaaacatccgttattaaaaatctcggttccaacgccgtacagcagcaatccttgatcaacggtgatattgatatcgccgctacgcgctatacaggtgacgcgctgaccgggacgcttcgcatggagccggaaaaagacccggacaaagcgctgcggctcgttcagcgtgaatttcaaaacagatatgacatgaaatggtttgattcttacggctttgataatacatacgtctttaccgtttccggacagcttgcccgcaagtaccatttagaatcggtatccgatgtcaaaaaagaagcgtctcatctgaaattcggcgtagataactactggatgaagctgagaggcaacggatatcaggattttatgaaaacgtacggaatgtcatttgaaggcacgtatccgatgcagatcggcctcgtttacgacgcgctgaaaagcagaaagatggatatcgcgctcgcttattccaccgacggaagaatcatcgcttacggactgaaaacgctgaaggatgataagcggttctttcctccgtatgactgttcacccgtcgttccggatcatgtattaaaagagcatcccgaactggagggcgtgatcaataaaatgattggcgcgattgatacaaagatgatgcagaaaatgaattacgaagttgacggccgattaaaagagccgtccgttgtggccaaggaatatttagaaaaacatcattactttgaataacggaaaggagatgtgcggatggacacgatgaaggagctgtttacgtattacgctcaaaacggcagctatgttctgtatgagtgctggcggcactttctcatgtcggcgtacggcgtcgttttcgccgccgttttcgccattccggccggaattgtgacagcaaggcacgggcgtctcgccggctgggtgtttgctgtggcgaacgtgattcaaaccgttccggcgcttgcgatgctcgccgtcctgatgctcgtcatgggactcggcgccaatacggtcatcacggctttgtttttgtattccctgctgccgattctcagaaatacgcacacgggcattatcaatattgagcacgcttatctcgagtcgggaaaagcgatgggcatgacgaaataccaaatccttcgtatggtggagctgccgcttgcgctttccgtcattatggcgggtcttcgaacggcgctcgtcattgccatcggcatcacggcgatcggcaccttcgtcggggcgggcggcctcggcgatatgatcgtcagagggtcgaacgcgacaaacggaaccgccattattctggcgggcgccatcccgaccgcgctgatggcggtagccgcagacctgctgatggcgtggctggaacgagccctcagccctgtgaaaaaacaaaaaagaaagctgatcgtacgctcagcctcatgaaaaaaagcattcttccgcgtgaaggatgcttttttttgatttcttgattaaattttgataactgcgctgtaaagtcttacatatcaaataacaaagcagaggggtaatcaaatgagcaacatcttagaaacgagacagctgcaaaaatcattcggcagacaacaggcagtggctgatgtgtctctatcggttaagcgcaacagtatatacggcctgctcggtccgaatggcgcgggaaaatcaacgacacttaaaatattgaccggcatgctgcagcaaacatccggcgaggttctgttcgacggacatacatggaagcgcgaagatttgaaaagcatcggttccctgattgaagcgccgccgctttacagcaacctgacagccgctgaaaatctgaaagtccgctgcgttatgctcggactgcctgattcaaggattgcggaagtgctggaaatcacgggattaacgggaaccggaaaaaagcgtgccggacaattttccatggggatgaaacagcgtctcggcattgcgttagcattattaaaccgtccgtcgcttttaattcttgatgagccgacaaacggattggacccgatgggaattcaggatttgcgggaatttatccgctccctgcccggacagggaatgacggttattttatctagccacctgttatcagaagtcgagcagatcgcagaccatatcggaattatcagtgacggcgttttaggatatcagggagaaatcagccgggaagacgatctggagcggctgtttctggaggttgtcaaatcaacacgggagaaagcggggactgggaaatgattcagtacatgcaggcggaacaccttacatctaaaagaacatttatcagaaagctgattattcttatcccgcttctgaacacggctttttcttttctgctgaatgccgcctattttatgacgggcacgttcaattggtgggcggttattttcatgccgctcatgattgctctaatgtgcggtttatctgttaaaaaagagaaaaaatcagcgaatgaccgtgcggtgtactcactgccggctgacttgaagagcatatggttctcaaaaataagcttgatcgcgctgtattcactcctatcgcaaatcgtctttttagtcatcatgtttttgctcggccttgtgtttccggcaattgctgcggttcagctgaaaggtattgaagcaagctcccttttgtggctgtctgcgctttgggaaattccgttctgcttatggattgccagacagttcgggtttacggcagtcattctcatcaatatgatcgccgcctttgttttaggcattgtgcctgcgtcaggctcattgtggtggctgagtccatggagctggtcagtccggctgatgtcaccgattctcgggatccatccgaacggaattccgcttcccgcaaacagcggcttattaaacggaaacgtgatcattccggctattattctttctattctttcttttatcgcgataagttttgtttccgccgtgtctttttcaaaagggggaaaccggtcatgaccgtgcttttgctatatatgtgggccgatgtattaaaaatgaagcgcacgccgctcatatggatgcatgttgcggcgccggttttatgcgcgggatttttcctgttgtatatgtatggaagggttcatgagccttatatgctgtacagtgtgtttttcagcgcgattgctgttttataccctctaatcatcagtattgtctgcggcatgtctgcctccgtcgaggaacaggcgggtcattttcagatgatgctggcagttccgcattcgaaaatcgtcagttttgcgggcaagctgcttctattgctgctcttgaatgtgttatcgataggtctcgccatctgtctttatttggcggggatgaaatttgttcttcacatcaatgatctcccgtatcttctctttttaaaaggaggggcgtggctgattgccggcagtattccgctttatatgatgtctttttttgtcagcataaagtacggcatgggaccgtccgggcttttaggaggtgcgggattattaatggcggcgctcatgaatacgggacttggcgatatcatctggcgttttttcccatgggcatggagcgtgcggctttcaggccttgcaggactgctgcattttgacaaagtcaaaaaagagttcctcccttatgtaagatacgatatgagatacggagaaataatgttatatttttctatagtgatattatgtctggccggcctctattggtgcagaagatgggaagggcggcgttcatatgaataaaggcaaggagcgattcggccggtggcaaacattttagcaattgatgatgaaaaagatattctcgttctgatcagaaacattttacagcgtgatcagcatacagtaacgattctggaaaaagcggaggatcagtcattggatttttttcaaggctatgatttgattcttctcgatgtcatgatgcccggaacggacgggattgaactctgccggcggattcggccgctggtggacagcccgatcctgtttttaacggcaaagtctgacgaagaatccattgtgaaaggcctcatgacaggcgctgatgattacatcacaaagccgttcggcgtacaggaattgatggcaagggtaaacgcgcatgtcagaagggaacggcgggaaaagcatcagacgaaacggctgatatcaggcttcatgtttgattttgacaataaagaagtgtggatggatgaccggaaactgcctcttacgaaaaatgaatataaaatcgttgaatgtctggcacagcataaaaacagaacattctcacgggagcagatttacgaggaagtgtacggcttggacggcgatgcgctctattcaaccattacggagtttatcagaaccatccggaaaaaatgtaaagaacacggggctgatccgatcaaaacggtgtggggtgtcggatacaaatgggaatagcaaaaggaaaatccagcatccgcaaagagcttgtcaaatttaccatcacgctgtgtctgagcacgatgggggtggcggcattatgtgtcgccttaaatgccattgccatgaatgccggagcgatcctgcccgcaaactacagcgagcatgaggcggaacagatcaaaccccgcctgaaatcagcggaaaagataacagaagacatgatccccgcaggtatgacatacgccgtttttgataaaaaaacaaagcggatgacaaaaggaacgatgacggaacaagatgcggccaacgccagaaaaaagattcagcatcagccgtattttaattatgctcaaaaaggattcatggtgataaatcggaaagatgaatacggcgttctccaatattcactcaggtctgaatttcagtcgccgctgttaaggcgctatctgccgaattatgaatggacggggcttacgattctgatcactttgcttcttttgaccgtttttatcgtgacgacgcgtttcgccaatcagctgagacggcatttcagcacactcagctccattacggcaagcattcaaaaacagaatttaaatatcaatccaaaaaggtcgcgtataaaagaatttgacgatgtcattgactctctgctgaaaatgaaagacgcgcttcaggcatctcttgcggcgcaatgggaggcggagcggataaagaaagaacaaatcggcgcgcttgcgcatgatattaaaattccggcaacgattattaaaggaaatgccgagctgcttcagttaacagagcctgatgaggagcaggcggaatatgcgcagtatattctggatgccggaaacaaaatcgagcattatgtcggacagctgatccagctttccaaagcggaggaggcagttgccgttcatgtggaatataccgacctcaaagagtggattcaaaacatatatcgtgacgcggcggcgcttgcggggccgaagcaggttgatctcgccctcagcgaacggggaattgaccgaaaagaagcgccgatcgatcatgagctgctccacagggcggtcatgaatatcgcggcaaatgccgtcgactatacgccggaaggaggggaaatccgtgtggacgtcctgtgcaccgattccgccctccatcttgccgtatccgacagcggaagcgggttctcaccggaagcgctgaaaagagcgacacagcttttttacacggaggataaaagcagacattcggcggggcatcacggcatggggcttacattcgcccatcatgtcgtacatcttcaccacggcgaattaatacttgaaaatcaggagtctggaggagcccgggcggagattcgaatcccgctggaaggcgtcagacaaaaacaagccctgcacgcctgagggcttgtttttctgtttaagaaaagcaaaaataaaaacggctgtccgtttgagagatcagccgcttatgcggaaaagagtttattaggaaggatcaatccattgtgaagaccacttggaaatttcctctaaaataggggctaatgcgcagcctttttccgttaatgaatactcaatgcggacaggcgtttcggggataacatcccgtttgatgacaccttctgtttcaagttctttcagacgttctgacaagactcttccgcttaaattcggaagcgccgcttcaatttcgctaaatcgctgctgtccgttcaataactgaaagacgattagagccacccagcgtttacttaggatgtcgaccgctttttcgaatctggggcacatttctgattggttcatgctttttcacctcgtcttctgctattataccgcaaaatcggagggaacgtacgtctggcgcttgttaagttgaggagaggatcaaaaagaggatgaggaatccggggagcgctttttcgcttcagccgcgataaaatcaaagtatttgctgacgctttcaatatcttcttttgtgaaatgctgccactttttgctgtcaaacagcggcaaatgctccgcacctctgtcaacggcggtctgatagatggcgcagatggattgatagctttcggaggtttcgcggatttcctcctgaaatgccttgatgtgtccggcccgcgccattaactcctcgtacggaatttttaatgtgtccgccaattttctgatggtcgcgggtttaggaatgccgcggtgcccgttttcaattctggaaatggtcgccgagctgacgccggaatagacggcaagctgattgacggtaagcttccgggcgcggcgcagctctcttaattgctttccgaatgtgttcaataagatcgcctcacatgtgcaaagtcatgagtcttcgtttgttctttttttggcttccgcagataagaacgcaaagtatttatcaagcagaaccaagtcttctttcgacaggtgccgccagttctcccgctccaatagggataaatcatgcagctcatacgtttcggctttttccagcaaggtgcagcccgtgtcgtacggggctctcgtttcctggacggtctctatgtatcccgccgtctgcatcagttcctcatacgggatttttaacgcatctgcgagctttttaatggttgcaggtttcggcaccccgcgtttgccgttttcaatccgcgagattcccgcggcgctgacgcctgaatacgttgccagctggttcactgtcagatgccgtttttcccgcaatgtccgcaattgtttcccgaagctttccacagtctctccccctcccgcggtctatttatattctagtatgtttattgactaaagggaatagccaggctggaaaagtattgacaaaagttaacaaaagccgtatcttatgtataagaaagaaagtatttgacagaacggaaggtgaagaaagtggtcgaaaagatacagatcagaagagattatgtgctgcagtatatggtcaataatgactactcgttaaaccagctcgccctggagatcggaatatctcccgccacactgagccgtgtactgaatggagagcggaggccgggccagctggtcatcggaaaaatgctctattactttgacatgaaatttgaagatcttttttactacgacttcgttgacaaaagtcaatgatgatggaagattcaaacgcatttccgtttttctgacatgatgtgcaccgatacggcgtgacatgcctttgtttttcatgtaaaatagaagcaatgtaggccagtcagtctggaggtgtatgggatgcacacattattgattaccttattggttatcgtcagtattgcacttattattgtcgtattgcttcaaaccagcaaaagcgccggattatcgggtgcaatttcaggcggggcggagcagcttttcggaaaacagaaagcaaggggccttgatctgattcttcaccgcacaaccgttgtgctggcagtcttgtttttcgtgttgacgatttcgctggcgtatatcgtataaggcaatgtttgtataaggtctgatttaatatcaggcctttttcttgttgagagacggcgtttgtttctcgcaaaactgtggaaaactaaattgaatgtgcaaaaaaggggttatgagcatgaaaattgtgacaccaaaaccatttacatttaaaggcggagacaaagcggtgcttctgctgcacggatttacgggaaatacggcagacgtcagaatgctcggccgctacttgaatgagcgcggctacacttgtcacgcgcctcaatataaagggcacggcgttccgccggaagagctggtacatacggggcctgaagattggtggaaagacgtcatggacggttatgaatatttacggtctgaaggctatgaaaacattgcggcctgcggactgtcgcttggcggggttttttcattgaaattgggttacactgtacccataaagggaattgttcctatgtgtgcgccgatgcacattaaaagtgaagaggttatgtacgaaggagttctctcctacgcgcgcaattataaaaaattcgaaggaaaacagccggagcagattgaaaaggaaatgaaggagtttgaaaaaacaccgatgaatacgctcaaatcgcttcaggagctgattgccgatgtgcgcaaaaacgtcgacatgatctattccccgacatttgtggttcaggcacggcatgaccatatgatcaatacagaaagtgcgaacatcatttacaacgaggtggaaacggacgacaaacagctgaaatggtatgaagaatcaggccatgtcattacgctggataaagaacgggacctcgttcatcaggatgtgtacgaatttttagagaaactcgattggtaacaaacaggaggtcgaataatggaaaaagaagcgtttatggaccgtcttctcgcgtttatgaaggaagaggcgtacaagccccttaccattcaggaactcgaggagatgctgaacatcacggaagcagatgaatttaaagagctggtaaaagcgctggtggcgctcgaggagacgggacagatcgtccgcaccagaagcaaccgctacggacttccggaaaaaatgaatttagtaaaaggaaaaatttccgcgcatgcgaaaggattcgcgtttctattgccggaggatacctctttaagcgatgtgtttattccgccgaatgagctgaatacggccatgaacggcgatatcgtcatggtgcggctcaattcccagtcaagcggatcgagacaggaaggcacggtcatccgcatcttggaaagaagcatcgaccgcgtcgtgggcacatacacagaaacgaaaagcttcggctttgtcatcccggatgataagaaaatcacgagtgatatttttattccgaaacatgccaataacggcgctgcggaaggccataaagtcgtcgtcaaactgacaagctaccctgaaggcagaatgaacgccgaaggagaaatcgttgaaatactcggccataaaaatgatccgggcatcgatattttatccatcatccataagcacggcctgccgggagattttccggctgaagtgatggagcaggcaacaagcacgcccgataccatcgatgaaaaagacattaaagaccgccgtgatctccgcgatcaggtcattgtcaccattgacggcgccgatgcgaaggatctggatgacgccgtcactgtaacaaagcttgataacggcagctacaagctcggcgttcatattgccgacgtcagccattatgtcacggagaattccccgattgacaaagaagcgctggaaagagggacaagcgtgtacttggttgaccgggtcattccgatgattccgcacagactgtctaacggaatctgttctttaaatccgaaggtcgaccgcctgacgctttcctgcgaaatgacaatcaaccagcagggacaggtgacagaacacgagatcttccaaagcgtcattaaaacgacggaaagaatgacctattcagatgtcaaccggattctcacagaagacgacgccgagctgaaagaaagatacgagccgctcgtcccgatgtttaaagacatggaacgtctggcggaaattctccgggcgaaacggatggaccgcggcgccgtggattttgatttcaaagaagcgaaggtgctcgtcgatgaggaaggcgccgttaaagacgtcgtcatcagagagcgctcagtagcggaaaagctgatcgaagaattcatgcttgtcgcaaacgaaacggtggccgagcacttccattggatgaacgtgccgtttatttaccggattcacgaagagccgaacgccgaaaaactgcaaaagtttctggagttcgtcacgacattcggttatatcgtcaaagggaaagccggagacattcatccgcgcgcgctgcaaagcattcttgacgaagtgcgggaccgtccggaagaaacggtgatttcaaccgtcatgctccgttccatgaagcaggcgaaatacgacccgcaaagcctgggccatttcgggctggcgactgaattttatacgcacttcacatcgccgatccgccgctatcctgacttaatcgttcacaggctgatcagaacgtatttgatcaacggacaatcggacgaagcgactcaagaaaagtgggccgaacgccttccggaaatcgctgatcatacgtcaacgatggaacgtcgcgccgttgatgcagagcgggaaacggacgatctgaaaaaagcggaatatatgcttgataaaatcggcgaggaatttgacggcatgatcagttccgtcacgaatttcggaatgtttgtcgagctgccgaatacgattgaagggcttgtgcacgtcagctttatgacggatgattattaccgttttgacgagcagcatttcgccatgatcggtgaacgcacgggcaacgtttaccgcatcggagacgaaatcacggtcaaagtcgtcgacgtcaataaagatgagagaaacatcgactttgaaattgtcggcatgaaaggcacccgccgtccgagagaaacgacaggcgaccgcagaaaacgaggcagaccggcgcggaaacgcgtgttaaacagcaataccccggcttcaccgccgaaatcggaggaaaaaggggaatggtttacaaaaccgaagaagaaaaagaaaaaacgcggtttccaaaacgcgccgaaacaaaaacgcaaaaagaagaagtaaatgcgaaaagcaaatggggcaaaatgctctgtttgctttctttcgcaagccgcattttcattgtcgcggaacgctccatttgctaaaataaagcgtatcgcacacatgaacggtttttgcggagagaggaggataaggcatgccaaaaggatcaggcaaagtattatcgcaaaacaaaaaagcaaaccatgattactttatagaagaaacctatgaaacaggcatcgtgctgcagggaacggagattaagtccatccgcgccggccgcgtaaacatgaaggattcctttgcgaaaatcgagcgcggcgaagtgttcctccacaacatgcacatcagcccgtacgagcagggaaaccgctataaccacgacccgctccggacgagaaagcttttgatgcaccggaaagaaatcaataagctgatcggcctgacgaaagagaaaggctattccctcgtgccgctgaagctgtacttgaaaaacggctttgccaaagtgttaatcggcctcggaaaagggaagaaaacatacgataaacgcgaagatttaaaacgaaaagacgccaaaagagaaatcgaaagagcgttcagagacagacaaaaaggcttctgatgcctgagccttgatgtgataactgccgtatgctatactgttcacacatcagattcacaggctgtttattgaagacattcccaattgaatttgtctgtgatcatgatataataacagtacagccagttgagcaagagcttgatagatctcccgtatacccttaacaaggggacgttacggattcgacagggatggatcgagcttgagctgcgagccgagaggcgatctcgttaacacgcacctaaatataactggcaaaactaaaagttttaaccaaaacttagcactagctgcctaataaacgcagcgagctcttcctgacattgcctatgtgtccgtgaagagcacatccaagtaggctacgcttgcgttcccgtctgagaacgtaagaagagactgacagactagctctcggaaggcccgcccgcaggcacgaagacgagtgaaacacgaaatatgcaggctacgctcgtagacgcttaagtaatcgatgtttctggacgtgggttcgactcccaccgtctccatacataacagaggaaccgcagtgccgtcacatgacgcactgcggttttttcatgccgaaaaaaaggagtgaatgtaaatggaaatcgccatcatagacggaaaagatgttaccagcacagaagcattacaccgaatcttaaaagatcaattagatttcccggactattatggcgaaaatctgaatgccttatgggattgtcttacaggctggatcgaacttccgctgactttggtgtggaagaattttgacatcagtcagaaggaattgggttcggatgctgataatgtattaaggatattaaaaaaggctcaggcagaattagatggtgaatttttcattcaaattgatcagccgtcagccgggacaacggacaggcactaaaaagtgcgtacttcccctcatccatttttctatccgataatagggacggaaggtttcaggcttttgatttctgtccatatataagaagagacttgcgatagggaggaatggatgatggatttgcagttgaaagggaagacggcgcttgtgacgggatctacgtcaggcatcgggaaggttcaacaatggacgataacagagtggcaacactttttaaaaatttctttgttcataagctcaaccttttcctttgtggcagagggatagaggtgactacatgattaacgctttcaccacatttttatgtcctagcctctgagcaatgacaagaggattttgcatcttttatgaatcaaatatgatgcgtgagagcgtctaaattcatgaataaggattcttttgacaccagacagctttaaatatttctcgtatcgtctatctattgtacttgttgcgatactttataaaaaaatattaaactttatatttatgttttttaacttgtgctatctttttagcgtttttttatacctttttaataactaaaataaatttcaccgcctcaataataactcagaaccgcagtgcctgcatatgacagcgctgcggtttttttcgtgtaccttcccttctaattagataaataatcctcatacttcttaccttataattagtaaattaattaaatgaaagtaaaaactttataattacaagtttttataggttgaaaaaactatattttggtgatataactgttaagttaaattgttgaaaaaaatatatataaaggaaaggtggagtgtactttactcagcttataaatttaacttttatttttgataatagaaactggaggacatttttgtgaaaaaaatcttaattgctattctaattattttcatgttttcaatgattaatttaccgaattacataaagcctgaaaaagcaattgctgcttcaaatgaaatgaacaagaaggatcttactgatttagacaaagcattaaatacgcttttaaagcttcaggaagagtatcacaaattagataagtctaaacaaacaaaatgggtagaaacaaaaaagaaagcagtcaaaaaaattattgataatgaaattaaaaatgcaaaaaaattaataagaactaaggttatccctgtagtacaaagagcagtagatgattataaaattcttgtgcggactttgaaggaaattggtaacgatattgatgaaatagttgctgcattagatcaatgtaataaagctatggatgaaattaatgttattcttgatggcgaagtaaaaaatgttaacgaaatgaataaagccatggacggatgggttaaaaaccttgatgacatgaataaaatagtagatgaaatgaatagggacttagatgatatgcaaggagccatggatcagtgtaatcgtggttatgatcaaatgaatcatgcacttgtcggccttaataaagcaacagacgagacgaatgctaatcttaaagctattgaatctaatataaggcaaatgaccaaatcagttgatcagattaattctggagtttcgcaagtatccaaaaatatgaaacatgtgaataattcacttgataagctggataaaaacttggatgctgtaggtaagactaaagtgaattataattatcattattattcttcagatggtttaacgactacgaaattaaataaactaaataaaaaaacaaaggaattggagaattctcaaaaaaatataaagaaaatagaagttaatatagacaatatctctcattatgatgcaggtaacctaaaaaatgcaaaaagtatgttctctgttactgctgacctcattccaattttatcgaatattaaaggtgggagtgaagccatatcaggtaaagacctgattacccaaaatgacctattcgcttttgatagaacagtagccgcattaagtatagtagggggagatttaactaagcttccaggaaaattggcggggaccgtatcaaaggctaacaaaacatcaaaatatgttgagaatagtgttaaagctaataaagtactgaatagcttcagtgaagttgctgattatgtttccaaacatggtaagttgccgaataactacattacaaaagcagaagcagaaaagctaggatgggtaaacaaaaagggaaacttatcaaaagtagcaccaggaaaaagtattggtggggatatatttaaaaacaaaggcaaccctttaccaacagctaaaaatagagtatggtatgaagcggatataaactatactacagggtatagagggaatgacagacttctttattctaatgatgggttaatctataaaacaacagaccattataaaacatttcataaaataaaatagtggaaggtgttattgatgttaaaagtcatcatagacggaaaagatgttaccagcacagaagcattacaccgaatcttaaaagatcaattagatttcccggacttttatggtgaaaatctgaatgccttatgggattgtctgacaggctggatcgaacttccgctgactttggtgtggaagaattttgaggccagtcaaaaggcattgggttcggatgctgatgatgtcttggagctgtttcaagaggctcaagaagagttagggaatcggtttgtcattcaaatcgatcagccgtcagccgggacaacggacaggcactaaaaagtgcgtacttcccctcatccatttttctatccgataatagggacggaaggtttcaggcttttgatttctgtccatatataagaagagacttgcgatagggaggaatggatgatggatttgcagttgaaagggaagacggcgcttgtgacgggatctacgtcaggcatcgggaaggcgattgcggcttcgctgattgcagaaggtgcggtcgtgatcattaacggccgccgtgaagaaaaggtgaacgaaacgatccgggaactagagaaacagacgccggatgcccgcctctatccggccgcatttgatttaggcacggcggaaggatgcggcgcgatttttcagcagtaccctgatgtggatattctcgtcaacaatttaggaatctttgaacctgcggaatactttgatattcctgacgaagagtggctccggtttttcgaggtgaatatcatgagcggcgtgcgactgacacgccggtatgcaaagcggatgattgaacggaaggaagggcgggtgatctttatcgcgagtgaagcggccgtcatgccttctcaggaaatggcccattacagcgccacgaaaacgacgcagctgtcgctgtcacgcagcctggccgagctcacggaagggacgaatgtgacggtgaatacagtcatgcccggctccacgaaaacagagggcgtcgaaacaatgctcgagtcgctttatcccggtgaaaacctgacagtggctgaagcggagagacgatttatgaaggagaatcgtccgacgtccatcattcagcggttgatccgtccggaagaaatcgctcactttgtcgcctttttaagcagcccgttgtcgtctgccattaacggatctgcattgcggatcgacggcggcttggtgcggagcattatataagatgaacgtataaaaacccccgtaaagcgggggtttttttaatgcggatcacgctgaaaccggctgatgatcctgctgattaaatcttttgtggcggagtcaaaatgctcttctttttggtttgtcaacagcccgaccggcggtgaaattgttaagttatggatcggaatgaccttcgtgccctcgatcggctctgagtgcgccgtcgccgtaaagattgagacgccgatattttccctgacatagtattgatgagccatgctgctggtcagctccatttttcgatagcggctaccgatggcccgctgcaggtgctgttcaatttgaatccggatcgggcaattggcgggcgtaaaaatcaaacattcattttctaaatcctcgagattaacgcttgctttggcggcaaggggatgtctgtctgacacgatgacattgagcgagtcatggaaaaacggatcgaaataattttccagaatcagctccggctcgccgcatacggcaaaatcaatggcgccctccagcagtttgcggctgcatgtattggcatcatccacgctgacattgaccgacatgtcaggataatcatttaagaaaccccgcagtacggcagggaagatcaggcttgccgtcggttcggatatgccgatctgaataaggccggcctggccctgtctgatatcggccagagtatggtcaagcacctcgtattgcgcgagaagctgcccggcccgctcatgaaacagccgccccgcccttgtcagcttcagcttctttccccgttcaaacagctgcgcgcctacatcctgttccagctgtttaatccgcattgaaatcgtcggctgtgagtagttcagaatttcggcggctttataaaagctgcctgactgtacgatcgtatgaaatgttttaatggtgcgtaattccaacgaaatcccctcccggctgttcattaattttcttgaacctttcctttactttttttgattagtcaaataaatcagttttctttatagtataaacaatcaaagcttagtaaacaaattggaattatatatttttgcggggagagtgaccggaatgagtgaagacatatttcgattggctgagaaaaaggatgcgccggagtttttagagctgctgtacagcgcatttcagccgatccgcaatttggagattgactggccgtcggcgcgggccgatatcgatatggtaacagaaaatattgaaaatcattcagccgtcgtgctcgaacgggacggacggcttctttcaaccattacgatccgttttccgtgggagagtgacacgcctccgtcaaaatatccgtttgtctggtggtttgcgacgcttcctgagctgaaggggcagggcatcggcagcaaacttttgacttatgtggaggaacacgtgctgcgggatacgctgaaggccccggccatcacgctcggcacttcggcgcgcaagcatccctggcttgtagatatgtacagacggagggggtatgaagtgtattttgagcaggagaaagacggagacattggagtcatgatgagaaaggtgctcataccggagcggtttgacgcgtcgctgttaggcacaccgagctgggcgcaatgataaaaaaacggatcagagccggctgtctgcttctgctgctcggcgtgctggccggctgcgggcaaggagaaagcacaaaagccgggagcggcgtgcagaccgtcattgtcggcacgggaactgattttccgaacattgcttttatggatgaaaaaggcgagctaaccggctatgacattgaagtgatgaaagccattgatgaacagctgccgcaatacaaatttgtctttaagacgatggatttctcgaatctgcttacaagtcttgcaaaccggaaaattgacgtgatcgcgcacaatatggcgaaaaataaggaacgagagaaacgctttttgtatcacaaaatcccgtataactactcgccgatgtacatcacggtgaaggcggataatgacgcgatacacacgctccgggatttaaaagggaaaaccgtcatcgtcggcgcgacgtcaaacgcggcggattatatgacggcatacaacaaagcccacggcagcccgatacatttgaaatacgccgggcagggcggcaatgacacagcgaaccaaatggagacaggacgcgctgacgctaccgtatccacgccgtttgccgtcgattttcaaaataagacgcacgcgttcaaacaaaagacggtcggtgatgtgctgctggataccgaggtgtattttatgttcaataaaaacagccaaaccctggcggacgatacggatcgggcgattcaaaagctggagaaggacggcacattgaaaaggctgagtgaaaaatggctcggcgcggattattcaaaatcaagtttcacgaaataactgaagcagaaaacggggcgatcacatgaaaataagactggcggtcatgtcattaacaattgccgcaacggcggcgttatcagcctgcggcgcgggcggagaggcggcagcaggcaatcagaaaaacgtgaagaacatcacggtcggcaccggcactcaatttccgaatatttgctttattgatgataaaggcaaattgacgggctacgacgttgagctggtgaaagagcttgacaggcgcctgccggactatcgtttcacttttaaaacgatggatttctccaacctgcttgtcagcctcagccagcataaagtcgatatcgtggctcatcaaatggagaaaagcgccgaacgggagaaaaaatttctgttcaatcaagtcgcgtataacaacttcccgctgaaaatcacggtgcttcaagaaaacgggaacattcacggcattgatgacttgaaagggaagcgggttattacgagtccgacgtcaaacggcgcgcttgtgctgaagaaatggaatgaaaaacacgacagtccgtttgaaatcgcttatgccggccaaggctccaacgatgcggccaatcagctgaaatccggccgcgccgatgcaacgatttcaacaccgtttgccgtcgatttccaaaacaaaacgagcgcgatcaaagaaaaaacagtcggcggggtgctgtcaaatgccaaagtgttctttatgtttaacaaaaatgaacaaacgctgagcgatgacattgataaagccctgcaggaaatcattgatgacggcacgcttaaaaagctgagtgaaaagtggctcggcgcggattattcaaaggagcaatattaagtgaaaaagagagggatcggcaatggaaaaagcgtttgatatcagtatgatctcatcctttgtgccgacattgctcgggtatttgcccgtcacgctgtatatattggcggtgtctttgctgttcggctttctattggggctgcttttggcgctgccccgcatctatcgcattcccgttttgaatcagtttgcgaagctgtatatctcttttttcagaggaacgcccatcatggtgcagctgttcattgtattttacggtattccggcgctcacggcgctcgccggaattgatacctccaaaatggaccctttgtatgcggccatcgccacgtacgcgctgagcagcgcggcaagagcggccgaaatcatcaggggaggtgtgaacagcgtcgaccgcgggcaggcggaggcggcgttcagcatcgggctgaacggggggcagacattccggcgcatcattctgccgcaggcgcttgtgcaggcctttcccaacatcgggaatatggtgatcggtttcttaaaagatacatcactcgctttttcgatcggggtgatggatatgtcgggcagaggacagaccttgattacatcgagcaatcattctttagaagtgtatatctcgctttctgttctgtattatgcggccgcccttttatttgaatgtgtcttcagatgggccgaaaaacgaatcaagaaagatgagacgcgccttgtgacggtttttgacatgagcgcgcacggctgaaaaggagggagaacagtggagctggacattccatttatcggcactgcgataaaacaaatggtgaaaaccattccgcttacattggcgatgacggtcattccgattattgccggatttttcatagctctcggcaatatcatggtgcgtatattccgcatcaaatggctgctggcctgctcagcgttttatgtgtcttttttccgcagcaccccggcgattctccatatcatgctgatttatttaggggttccgctgattgccgatcaattcagccgcgcgtttcatctcggctggtcggccaatcagattccggtcgccgtgtttgtcatcatggcactgtcattaacggcaggcgcttatatgacggaaattctccgatccgggatcatggccgtcgatacggggcaggcggaggcggcatattcaatcggcctgacgcggggacagatgattcggcgcgtggttctgccgcaggcgttcatgatatcgctgccgaacttcaccaacataggcatcggctttttgcatacgacttccatcgcggcaattgttgcggtgcctgaaattacaggaacggcgacgattgcggcatccgataactatgcgtttctggaagcatttatcggggcggccgtgatttattggggattaacgctgattctcgaagctgtaaacagtctggcggaaaaaagggcggccagatatcaaggaggcgcattatgatcgaaatccgaaacattcaaaaacattttggcagtcatcacgtgttaaaggggatcaatttaagtgtccggaaaggagaagtcgtgaccatcatcggcccgagcggttccgggaaaaccacgtttctgcgctgccttaatttacttgagcggccggatgagggcgccatttcgctgcacggtgaagtcattaactgcaaaaagcctgccaaaaaagacattctcagactgaggaaacagacggcgatggtttttcagcaatatcatttgttttcgcataaaacggcgattcaaaatgtcatggaaggcctgacggtcgcaaggaaaatgaaaaaaccagatgcgtacgccattgccgagcgggaactggccaaggtggggcttcaagataaattgcacgcttatccgaatcaactgtcgggaggacaaaagcagcgggtcgggattgcccgggcgcttgccattcatcctgatgtcatgctgtttgacgaaccgaccgcagccctcgatccggagcttgtcggcgaggtgctcgaggtgatgcttaacattgtgcggaccggcgccaccatgatcattgtcacacatgagatggaattcgccagaagagtgtccgaccgaattgtgtttatggatgaaggagcaatcgtggaacaaggaacgcctgaggaagtcttttacaagacgaaaaaagaaagaacgaagaagttcctccgccgcgtgctgcctgattacggttatgacataaaagagcgcataaaggagcctgtcgtatgattcgtttaagcattttagaccaaagtgtcaccgcggaaaaccaaaccgcagaagaagccttgcggcaaacggtgaaattggctcaggaggccgaacaatacgggtatgaccgtttctgggcggcggagcatcataacaatgaagagatagcgggatcagcgccggaaattgttctggggtatcttgccgcaagcacgaaaaaaatccgtctcgcgtccggcggggtgatgctgcagcattacagtccttataaagtggcggagcagttcagggttctgtccgcccttgctcccggccgtgtggcactcggtgtcggcaaagcgcccggcggatttcagctgtcaaccgatgcgctgcagcgggagcttatccagcccgcccgtttgtttgaagaaaagcttgaggagctgactcatttcatccgaaatgattttccggactcgcaccgctacgcgtcattgcggccggcgccgcatactgagtatgcgcctgacatctttttgctcggcggcagcgcggaaagcgcgatatccgcggccaaactcggcatttccttcgttttcgcctatttcataaacggtgaagaggctgcgttagaaaaagcgcgccacgcctttgacgagcatctgccgaaagggtcgaaggcggaatttcaccttgcgccgatggtatttaccgcgcatacaaaagcagaagctgaaaaacacgtggtatcgcgtgagtcggtcaaaatcattctcgaagacggcaaaaaggtgaatgtcggttcccgggaacaagcggaagcgtttcttgaacaagtcacgcagccgtataagctgatcacacaaaagacgggtgtgattgccgggacaaaagaagagacagccgccgagctgagacgattatcggttcaatacagcattactgattttgtgattttgtcgcctattaaaaatgttgaggaaaaacgattgtcttatcggctgttaagcgaagcggtgcagccggccccacaattataggagggatgaacatgagtcatgaagtaaacgtagtggtctggagcaaacagggctgctcctattgcgatgaagtgaaaggatatttgcgggaaaacgccgtggcatacgaaacaattgatgtgacagaacgggatgaattgcgtgacgtgctgcagacgaagtacggcatccgtcatgtccccgtcgttgaaatcggcagcggtgacagccgtgcgtatcaggccgttactcaagtcggcattgaacatgtagaacgggcgcttgccgattacgaggggaaaaagggggagagaaaatgagccggacggatctaattcaattcggagccatgattcacggtgtcggcggcacaacagacggctggcgccatcccgacgccgatccgacagcaagcacgaatgcggcgttttacaggcaaaaagcgcagactgctgaaagagggctgttcagctttgcttttattgcggacggcttgttcatttctgaaaagtccatcccgcatttcttaaatcggtttgagccgatcactattttatcggcgcttgccgcctctacaacccatcttggtttaatcggcacattttccacatcgttcactgagccgttcaccatcgcaagacagctgatgtctcttgaccatatcagcagcggccgggcgggctggaatctcgtcacctctccgcaggcgggagccgcgcgcaatcacagcaaagaaagccttcccgaccacagccggcgctatgccatcgcccaggaacatgtggacgtggtgcgcggtctgtggaattcctgggaagaagatgccttcgtccgcaacaaagaaaccgggcagttttttgaccctgacaaactgcatcgcctgtatcacaaaggcgagtattttcaagtggagggcccgttgaatatcggccggtccaaacagggagagccggtcgttttccaggcggggtcttcagaaaccggccggtcgtttgccgcgaggaatgcagatgcagtctttacgcactccaattcacttgaggaaacgaaagctttttatgatgatgtgaagaagcgggcggcggattacggccgggacgcttccaagctgcggatctttccgggaatcagtccgattatagccggctcacaagaagaagcggaagcgaaataccaagaatttgccgagctgattcccatagagaacgctgttaagtatgtggccagattttttgacgattatgatctgagccagtttccattggatgagccgtttcctgatttgggcgacgtcgggaaaaacgcgtttcaaagcacgacagaccgtatcaaaagagaggcgaaagcccggaatcttacgctgcgtcaagtggcgcgcgaagccgcgtttccgcgaaccaactttatcgggacaccggaacttgtggcgtcattaattgaaacatggtttcagcgggaagcggcggacgggttcatcattcactctgacatcccgggcatgcttgaagcctttgtagatcaagttataccgatcctccaggaaaaggggctgtaccgaaaaagctatccggccgatacactgcgggggaatctcggattggatattccggcctgcagacccaatccgattttgagcagaaactgaggtttctgctttttctgctgcttgccattcccgtcattacagccttttttaaaaaaatatactgatttcaagatattattgttgctaaatgatttttttgtaactataattattacagaactgatcagtataaaaaaacattcatatttcataataaatgtgtgtgtaatctgaaaacgaaagggttgtttacaatggcaaaagtactttatatcactgctcatcctcatgatgaaaagacatcttacagtatggcgacaggaaaagcgtttatcgattcttataaagaatcaaacccgaatgatgaggttgtacatatcgacctttacaaagagaacatccctcatatcgacgcggatgtattcagcggctggggaaaacttcaatccggcacaggttttgaagagctttctgaaaacgaaaaagcgaaagtcggccgtctgaacgagctgagcgatcaattcgcgtcagctgacaaatacgtattcgtcacaccgctttggaacttctcattcccgcctgttatgaaagcgtaccttgattctgtggctgtagccggaaaatcattcaaatatacagagcaaggcccgatcggtctgttgactgacaaaaaagcgctccacattcaggcgcgcggaggctattactctgaagggccggcggctgacatggaaatgggccaccgttacatcggcatcatgatgaacttcttcggcgttccttctttcgacggattaatcgttgaaggccataatgctgaaccgaataaagcacagcaaattaaagaagatgcgattgcccgcgcgaaagaagccggaaaatcattctgatcttaaaaaaaacctccccgccgtacggctggggggtttttcatattaaagggcaatcgtccgtttttgttcgctgcttctcatcgccgcttcaatgacacggatgacatcgatgccttcttttgccgtaacgggaagcggttttccgtttaagatgctgtctgccagcagtttgtagtacgtaaggtaagagccgttctcagaggggattgtttctgtatgccttttttcatccgctgcggttgtcagctctccgaagttgtcaggatcatcggcgccccagctgtcgtcaaccggctttttgcccgctgaaagcgcgtcttcctgtccgtccattccgtatttgataaagcttgcattccgtccgtgaatctgatagcgcgggccgcttgccgcattcatggagccggattgaagaatgacctgaagcttgccgtaatggagcgcggccagaaaacaatcaacagtttcactattgtcccgctgcttcatcacatgtgcggtgacggattccggcattccgaaaagcagaagtgtctggtcaataatatgtgaaccgagatcatacagcgttcccgtggcgggtccgtttttttcgcgccatctttcttgtacaaccggattgtacagatcgtagttgacttgatatgtatgaatgtcttgaagcgccccgtcccgaatcagcttttgtattgttaaaaagtcattgtcccaccgccggttgtgatacacgctcagtaagacgcctttatcttcagccgttcttctcagttcctccgcttctgctgaagtcgccgtcatcggtttttccacgacggtgtgttttcccgccaggaggcatttcatcgctgattcataatgcattccgctcggtgtcgtgacgatgacgagatcaatgtcaggatcaccggtaatgtcttcaatcgcgcgcacggcttcagcccccggcagatcacgtttgacctcctccgttctggaggtcatgacttttttgatctgataatcatcaaggacgtccaaaagcggcgcatgaaaaactttacccgacaaaccatatcccaatatgccaacctgtatcgttttcaatgaacttccccctcatgatatgtgataacattatataccccgcgggagtactggtaaaacttgtgtgttgaaaattttttacaccggattttcaagtctgtataatgaagataacgaagaaaaaaaccgaggtggaaaatggacaaacataccgagcatcaatcgttaaatcataaaagcgccaaagaaaaagaccagattctgaaccggctgaaacggattgaaggccaggtcaggggcattcagaatatggtggagaacgaacgatactgcgtggatattctcgtgcagatttcagccgtacaggcggccatgcagaaagtcgcgtttcatctgctggaagatcacgcccatcactgcgtagccggcgccattgagagcggaaacggggagccggcgattgccgagctgcttgatgttgtgaaaaaaatcgcaaaatcgtaaaataaaatgttttgaaataccctacaggggtatggtaacatgaagaagaaaaaacaagacgtggagggaatcatcatggaacaaaaaacactgcaagtcgaaggcatgtcctgtcagcactgcgtcaaagcagtagagaccggagtaggagaactgaacggagtgacggcggttcaggtgaaattggaagccggacaggtggatgtgacgtttgatgagaacaaagtctccgtatcagatataaaagacgcgattgaagatcaaggttatgacgtcgtataggatttatcgcgctgcggaaacgggcgcggttttcttttatcaaatttatacccccctggggtttatggagagagatgaggacattgagtgaaccgaaagaaatgaccattcaagtggggggcatgacatgcgccgcctgcgcttcaagaattgaaaaagggctgaaacggatggacggcgtcaatgacgcttccgtcaatcttgcgcttgaaacctcaaatatttcttatcagcctgacaaaatcgaagctggcgccataaaagaaaaaattgaaaaactcggctaccatgttgtgacggaaaaagccgattttcagattgaaggcatgacgtgcgccgcttgcgccaaccggattgaaaagcgtctgaacaaaatagggggagttgacagcgcaccggtgaatttcgccctggaaacggtcactgttgaatacaatccggaagaggtgacaccgaaagagctgaaagagaccgtggcaaaactcggctacagattagacgagaagaaagcggttgatggagccggcggattatcccaaaaggagaaagagcagcgaaaacagctgatcaggctgatattttctgccgttctctcctttccgcttctatggtcgatggtcagccatttttcttttacttcttttatctggatgccggatatcctgatgaatccgtggctgcaattcgcgcttgccaccccggtgcagctcgtcatcggctggcctttttatatgggagcgtacaaggcgctgagaaacaaaagcgccaatatggatgttctcgttgcgctcggaacgacggccgcttacgcatacagcctgtccatgacgattgcgtctctcggacgagacggacatgttgaggggctttattatgaaatgagcgccattttgctgactttgattttgcttggaaagcttttagagatgaaagcgaaaggccgctcatcagaagcgattaaaaagttaatgaagcttcaggcgaagacggcggcggttgagcgggaagggaaggtacaggtgattccgattgacgaggtccggacgggggacatcgtatatgtgaaaccgggagaacgcgtccctgtcgatggcgaagtgattgagggccattccgcgattgatgaatcgatgattacgggagagagcatgcctgtcgataagtctccgggaagcagtgtcaccggagcgacgatcaatgcaaacggctttctcaaaatcagagcggtgaatgtcgggaaagataccgcgcttgcacacattattaaaatcgtagaagaagcccaaggatcaaaagcccccattcagcggctcgcggatcacatttcaggcattttcgtcccgattgtgctggggctggccgtgctgacttttctcatttggtatgtatgggcggcgccgggacagttttctgaagcgatcggcaaattcatcgccgtgcttgtcattgcctgtccgtgcgcactcgggctcgccactccgacaagcattatggcgggctccggacgcgcagctgaattcggcattctttttaaaggcggagagcatttagaaaagacccagcgtctgacgacaatcgtactggataaaacaggaacggtgacaaacggcagaccggttctgacagatgccgtaccggcagagggaatgaacgaagaggaactcctgcggctggcggcggctgccgaaacgggatcagagcacccgcttggagaagccatcgtgtcaggagccgaaaaacgggggattgccatcccgaaaatcacccggttccaagcccggatcggttccggaatctatgcagaggctgacggcagaacgattcttgccggatcaagacggctgatggaatcagaacacattgaacatgaggcattgcttccgtacatggcccgcttggaggcggaagggaaaacggtgatgcttattgcggcggacggcaaagcggcggggcttatcgcagtcgccgatacgatcaaggaaacatctccggccgcggtgaaacgtctgaatgatatggggcttggcgtcatcatgatgaccggtgacaacaaaaagaccgcggaggccattgcaaaagccgcgggcatcggcaacgtgatcgccgaagtgcttcccgaacaaaaggcggcggaaatttcccggctgcaaaaagaaggcagacgtgtggcgatggtcggtgacggcatcaatgatgctccggcgctggctgtggccgatatcggaatggccatcggcaccggcacagatatcgcaatggaagcggcggatattacgctgatccgcggtgacctgaacggcattgccgacgccataggcatgagcaggctgaccatgagaaacatcaagcagaatttaggctgggcattgggatacaacagcatcggcattccgattgcggcgtccggctttctggccccgtgggtggcaggcgctgccatggcgttcagctcagtatcggtcgtgcttaatgctttgcgtttacagaaggtgaaaaaagacaaaatgggctgaggcctgttttgtcttttttattgacactttattcaaagcctgcatataatagagaaaacaaatatatgagtatatgttcatatatataaaatcgtttagctgtattgatgttatgggaatcctattacggaaagtagggtgagtcgaaaatgaaagcagccaaaggtgaatttgtattagacggacttgattgcagcaactgtgcaaaaaaaatagaaaacggcgtaaaagccattgacggcatagacggctgtgctgtcaattttgcggcaagcaccatcacggtctcagccggcggcaaaaacgagcaatggatgaaagacgaagtcgctaaaaaagtaaagtccattgatcctcatgtgaccgtccgtgcgaaacatgaagacaaacccggcgaggatgagtaccgcaaaaagctgcagctgatgttagtgagattggcagcgggagccgttttggccgtcatcgcttacttcgcgcacacgggcgccgtccttgagtttctgctcttttttgcttcatatttgatcatcggcggcgatatcgtagccagagcgggaaaaaacattgtccgcggccaggtatttgatgagcattttctgatggcgcttgccacgatcggcgcatttgtgattcatcagtatccggaaggtgtcgcggtcatgctgttctaccaaatcggtgaactgtttcagggagcggccgtcagccgatccagaaaatcgatcagcgcgttattggacatccgtcctgagtacgccaatgtgaaaacggaaaacggcatggctgccgttccgccgcaggacgtcaaagtcggacaggtcatcgtcgtgaatcccggagaacggattccgctggacggaaaggtgctgagcggttcttcgatggttgatacatccgctttaacgggcgaatccgtgccgagaaaagcggagccggggcaagatgtgatggccggatttatgaatcagaacggcgtgcttcatattgaaacctctaaaggatatgaagactctgccgtgtcaaaaatattggatctggtcgaaaatgcggccggacgtaaagcgaaaacggaaaactttattacgaagtttgccaagtactatacaccggccgttgtcattgttgcggtgcttctcgcctttttaccgccgcttctcgtgccttcagccgcgctttccgactgggtgtaccgcgcgctgattttccttgtgatttcttgtccgtgcgcactcgtcgtctccattccgctcgggtttttcggcggtatcggtgctgcgtctaaagcaggggtgctcgtgaaaggaagcaactatttagaagcgctcaatcaggtggcatacgccgtgtttgataaaacgggaaccttaacgaaaggcaatttcgccgttactgatatcaagccggcggcagggtttacaaaagacagcctgcttcatgcggctgcgcttgcagaagtccattccaatcatccgattgcttcttccatccgtgaagcttacaatcaaccgctcgcggcagacgagattgaagaatatgaagaaatacccggacacggcattcgggtgaaaaccggcggatcaacgattttggccggaaatcaaaaactgatggcaaaagaacaaatcgctttcggtacagctgaaaataacggaaccgtcgtctatgtcgccgttgatcagcagtatgcgggggcgatcgtgatcgccgacgaaatcaaagaggacgccaaacaggccattgccaatttaaaagcgctcggcgtgaagcggacagtgatgctgacgggtgattcaaagcagaccggagaagctgtcggccgagagctcggtattgatgacgtgtacacagagcttttgccgggtgacaaggtagaccgcgtcgaagaacttgaagcggtgctttcaccgaatgaaaaactgatgtttgtcggtgacgggattaatgatacgcctgtgcttgccagagctgacatcggagctgccatgggggctctcggctctgatgccgccgtcgaagcggccgatgtcgtcctgatgacagaccagccgtcaaaagcagccgaagctatccggattgcacgccgcacacgccggatcgtctggcagaacatcggatttgctttaggcgtaaaaatcatttttctcctgcttggcgcattcggattcgccaccatgtgggaagcggtcttttcagatgtaggcgtcatgctgatcgccgttgccaacgcgatgcgcgtcatgagagtgaaagcggaataattgtcaaagataattcgtttttcagggttttcttaaacaaggttgtcttggtaaaatagagaagcgggccatccggcatccgcttcttttttattttaaaaacaatgaggtgtctgagtgaaaaagaaacaatcgtctgcgaaatttgcggtgatactgacgttaatcgttgtcgttttatttgcggccatcgtaattattaacaaccaaacggaaaaagcgggcgaaacagtcgccgaacagccttccattaaaggacagcccgtgctcggcaaagacagcgcgcctgttacggtagttgaattcggagattacaaatgtccatcatgcaaagtatttaacagcgatatctttccgaaaatcaaaaaagattttatcgataaaggcgacgtgaaattttcatttgtgaacgtcatgtaccacggaagcggctcgcgtctggcggctcttgcttcagaagaagtgtggaaagaagacccggcatcattctgggctttccatgaaaagctgtttgaacagcagccgtcaagcgaacaggaatgggtcacgcctgcattgcttgaaaaaacggtcaaaagcaccgcgaaaaaggttgatcctgacaagctgaaggaaaaccttgataaagagacatttgcaaaagagctgaaagctgacactgacctgaatgataaattaaacattacggcgacaccgacgatttatgtaaatgacaaggtgattaatgacttctctaaatatgatgagatttcaaaaacgattaagaaagagctgaaaaatgaaaaatagaatcgtatttttatatgcttcttgggtgatagctcttgctgccatgctcggcagcctatatttcagcgagatcagaaaattcataccgtgcgagctgtgctggtatcaaagaattctcatgtacccgcttgtcctgattttaggaatcgccacctttcagggcgacacgcgcgtgaaaaaatatgtgctgccgatggccgtcatcggcgcatttatatcgatcatgcattaccttgagcagaaggtgcccggtttcagcggcatcaagccgtgtgtctacggcgtgccttgctcatctgaatatataaactggttcggtttcattaccattcctttcctggcattgacggcatttattctcattatgatctgcatgtgttttgtcaaaacggaacgcacggcaaaataaagagcctgctccatgggagcggctctttttctattatttgtaccaagctttgtttgtcgcaatctgtctgttatgggagctgtcccaaatatccacggaataggcataatcataattcatgacgcagcggatgccgctgccttgggcgtcatgctgaagtccgaagttatgggaaaactcgtgctgtgccgctttcgccgtgttggccgttccttgatcaaggttcacgctgaaagccgggccgctcggtttgccgttatatacatacgcgataccgccggcgtcaaaacttgattttgcggtaaaaccgacgacaaaatgataattttgatttctgaagctgccttggagattcgataaaatctgagaactgtttgagccggaagaattccaagcctgcacggcctgtacgacgaaatcaatgttgtgatcacggttaaaagcgacatccgcctgctccacgatctggacgattcgcgtttgccagtcgctgtatttggcgcggtattcagcgtccgccaccgccaaaactctgaccttctgagagcccgtgccggctttagttgaggctttatcctgactgacattgacattgaatcgtttcgtgccgacctgcttgccgttttcatccagaatttttgtgtcaaccgtctgttcaacttggaccggtcccttcaaatctttaaaatgatcggctttcggaagcgggtccgtatacaccgttttcgccggctccgcatgagtgtgcgaatgcgtatggctttcggctgacggcaggccgggaattaatccggcggccaataaaacaggaaaaacaagtgaactgattttcatctcataaccccctttttgttagagaaagtattcaatgaaacttccaataaaccttccattaaagtataaaataggaaaatgttcttgctctcagccgttacgggtgggattgtcccgggttaggaatcagaatctttcaaaaataaggttgattttaagagaaagcgattataaaatctaatggtcgtcagaaaatttaacaaataaaaaggagcatatggaatggcctgggagctgcttagtgtaatcggcatcattgcgtttgcggtcagcggagcgattgttgcgatggaagaggagtatgatattttaggcgtgtatattttggggattgtaacggcgttcggcggtggagccatccgaaacctgctgatcggtgtcccggtctccgccttgtgggagcaaggcgcgttttttcaaatcgctctcacatcagttacgattgtctttttgtttccgaagctgctgttaaggcattggagtaaatggggcaacctatccgatgccatcgggctttcggcgtttgccatccaaggcgctttatatgccgtgaaaatgggccatccgctcagtgcggtgattgcggcagcggtcctgaccggcagcgggggtggcatcatacgggatttgctcgcgggcaggaagccgcttgtgctcaaggcggaaatttacgcggtctgggccgcgctcggagggttaatcgtgggcctcggctgggccggggatgccgccggtttgtatgtgctgtttcttgtgcttgtggcatgccgcatctgcagttatgtgttcaggtggcgcctgccgaatcgttcctatcatatagatcagtaaaaaaaccgatttcacaaaagaaatcggttttttttcataacggcttctgataaaaaataagcccgatatgataagaaaaagggtatttgaccataatgctgaataatatgttgcatatatgtttgtatgatgaaagccggatttgtcagcttgatgtcggaggtgccgctgatggcaaaacgtgataaagagtggaaagaagagcaggaaagaatcaattttgtcatgaaggaactggaacagaaacaaactcatcttgaagcctcatcgggcggattaaagcaggatattgtgggcttgagaaaaacgttttgggatgatgtcaccgtgaatatggatgacgcccatgaagcggcggagacattttcaagcattaaacagcaggcggaaatgctttcagaacgtgaacggacgcatcggcttcaataccggcagcttcaaaaaatccaaaagctgaaaacctctccttacttcggccgtgtcgattttacggaacaaggggagtcctctgccgagcagatttatatcgggctgacttctttgatggatgaaaacaacgagcaatttctcatttatgattggcgcgcacccatctcatctctctactatcaatattccccgggaaaagcccgctatgaagttccggaagaaacgatagagggagacatcacactgaagcggcagtttatcattaaaaacgggacgcttaaagcgatgtttaacacggatatgacgattggtgacgaaatgctgcaagaggtgctgagcggccattccggacagcatatgaaaaacatcgtgtcaaccatccaaaaagaacagaacgaaatcatccgggatgaaaaaagcaaatatctcatcgttcagggagccgccggaagcgggaaaacatccgcggcgcttcagcgggccgcttacttgctgtaccgcgggcgcggtgtgcttgacgcccgtcagattgtattgttttccccgaacattttgttcaacagttatgtgtccgccgtattgccggaattgggagaagagaatatggagcaggccacctttcaggaatatatcatccgccggctcggacgaaagtttgattgtgaaagcccgtacgagcagcttgaatattgcctgactgaacaaaatcaggacgcactttccgtaaggctcgcagccattgcttacaaagcgtcaccagcttttcaggccatgattgaccgctatgccggctcgctttccggctcgggcctgatgtgtaaacagatcagcttccggggagacatcctgatttcaaaagaacggattgaagcctatttttattcgcttgatcagcagctgccgattccgaacagagcggagctgacggcggaatggcttctcgcggaaatcagcgctctcgaaaaaaaggagcgtaagaaggaatgggtcttgcaggagagcgagctgcttgataaggaagactatgccgaggtttatcaaacactcaagaagcaggcggcagatgatgaacctgcatttgacgaccatcagcgcgaacagcgcctgctcggcgccattattgtcggcaaagcctttaaaccgattaagcaggccgtcagacggctcggctttctcgatataaaacggatgtatctccggctgttttcagactggggagcttatgaaaagcccgattattgggagggcatcggcgctttgaccagaaacgcatttgcagaacggtcacttccgtatgaagatgccgctccgtatctgtatttgcaggatctgttagaaggaaaaagaaaaaacacacaaatgaagcacgtcttcattgatgaagcgcaggattattccccatttcagctcacgtatattcaaagcatcttcccggcggcaaagatgacggtgctcggtgatgtcagccagtcgatttatgcccacaccattacgggctcttcttccctcgccggctgctttcgcaatggtgcagaaaagtatgtcagcctgaaacggacttacagatcgacgcggcagattgttgaatttacgaaagcgctgctggctgacggcgatgacattgagccttttaaccggaacggggaaaaaccgcgtgttttgcggacggatacagaaaaagcgcggcaggaacaattggcggatacaatccgggagctcagacaaaaaggctgggagacggtcgccgtcatctgcaaaacggccgcggaagccaaaaaagtatttcaggcggtcagcgccgggagcggtgtccgtttgatcaataaagaaaaccagccttttcaaaaaggggtatgtgtcattcccgtgtatttggcaaaaggcattgagtttgacgccgtcattgccgctgacgcctccgctgtccagtacaaaagcgaacatgaccgtaagctgttatatacggcctgtacgcgggcgatgcatcatctgaccgtgctgtctccgggagaaccctctccttttataaaagaagtgcccgccggcttattcgtgtaagccctttgccaagtgcaaagggctttttatcattagtaatcttaatcattgtcatcatgattatatattttacttacatacaaactttcggtaaagtttcaattagaatattattttgacaattcctatagaaataacgtacgttacgtttaattccttgtgaggtggatatcgttgcaacttcaggtcatgaacagtccgtttaatcaggagcaggcagagctccttaaccgccttctgccgaccttgacagaatcacagaaaatctggctgagcggttatttggctgcggcccggtccgaatccggtgaaacagccgcacccgctgctccggctccagcagaaagcccggcagtctcaagagaagtcaccgtattatacggatcgcaaacgggaaatgcggaaggtcttgcgaaacagacggtaaagacgcttgaggaacggggattccaggtcaccgtcgcgtcgatgaacgattttaagccgaataatctgaaaaaagtaaacaatttactgatcgtggtgagcacgcacggagaaggcgatccgccggataacgcgctggcctttcatgaatttcttcacggcagacgcgcgccgaagcttgaagcgctccgttactccgttttggcgctcggggacagctcgtatgaatttttctgccagaccggcaaagagtttgacgagcgtcttcaagagctcggcggcacccagcttgcgccgcgggttgattgcgatcttgattatgatgagccgttttcggaatggcttgacgcggtcatcggcggtttgaacgaaggagcgggaaatcaaacagccgaagcgcctgccgagacgcctgctctcggggaatccgtttattccagaacgaacccgtttcgggcggaggttcttgagaacatcaatctgaacgggcgcggttcgaataaagaaacacgccatctggagctttcgcttgaaggagccggcctcgcgtatcagcccggagacagcctcggcatctatccggaaaatgatccggcgctcgtgaatgagctgatcaatgagctgaaatgggacccaaaacaggaagtggcggtgaataagcaaggagagacccgtccgctgaaagacgcgcttacttctcattttgaaattacagtgttaacaaaaccgctcctgcaaaaggccgcacagtttacggctgatcaaaagctgagtgaacttctggccgaaggaaacgaagagcagctgaaagcatacatcaacggccgtgacctgcttgatctcgtccgggatttcgggccgtgggaagcttccgcggaagactttctttccatcctgcgtaaaatgccggcccggctctattcgatcgcaagcagtttagaagcgaatccggaagaggtgcatctgacaatcggagcggtcagatatgacgcgcacggcagagaacgaaaaggcgtctgcagcattctgtgtgcggaaagactccagccgggagatacgcttccgatttacattcagcacaaccaaaacttcaagctgccggacaatccggatacaccgatcattatggtcgggccggggacaggcatcgcgccgttccgttcctttatgcaggagcgtgaagaaaccggagctgaagggaaaacatggctgtttttcggggatcagcactttgtcactgattttctgtaccagacggaatggcaaaaatggctgcaaaacggtgttctcacaaaaatggacgtcgctttttcccgggattcggaggaaaaggtatatgtgcagcaccgcatgaaagaacaaagcaaagagctgtatgaatggctgcagcagggagccgccgtatacatctgcggtgatgaacagcatatggcgcatgacgtgcaccaggcgcttctcgatatcattcaggaagaaggcggcatgagccgtgaaaaagcggaaagcttcctggcagacatgcagcagaaaaaacgctatcagcgtgacgtatattgattttggtttgaaaggagcttattcagcatggtgaacaacattttaaaagcgccggaaggccctccaagtgatgttgaggaaattaaagaaaaaagcgattatttgcgcggcacattgaaagaagtcatgctcgaccggatttcagccggcatcccggacgatgacaaccggctgatgaagcatcacggaagctacttgcaggatgaccgcgatctccgcaatgaacgtcaaaaacaaaagcttgaaccggcctatcagttcatgctgcgcgttcggatgccaggcggcgtgtcaactccggaacaatggcttgtcatggatgaactggcgcagaaatacggaaacaatacattgaagctgacaacgcgtgaaacgttccaaatgcacggaattttaaaatggaacatgaaaaaaacgattcagaaaatcaatgcggcgctgcttgataccattgcggcctgcggagatgtcaaccgaaacgtcatgtgcgcttcaaatccgtaccagtctgaaattcatgcggaagtatacgaatggtcgaagaaattgagcgacgatcttcttccgcgcacgagagcctaccatgaaatctggcttgacgaagaacgtgtggcgggcactcctgacacggaaacggaaccgatgtacggacccttgtacctgccgcggaagttcaaaatcggaatcgccgtgcctccgtccaatgatatcgatgtcttttctcaagatctcggcttcatcgccatcgtggaggaaggccatttaatcggattcaacgttgcaatcggcggcggtatgggaatgacgcacggcgatacggccacttatccgcagctttcaaaagtcatcggcttctgcaaaccggagcagctgtatgatgtagcggaaaaaaccattacgattcagcgcgattacggaaaccgttccgtcagaaagaacgccagattcaagtacaccgttgaccgtctcgggctggaaaacgtaaaagccgagctggaaaaccgcctcggctggcagctggatgaagcgaaaccttatcattttgatcataacggcgaccgttacggatgggtaaagggcgtaaaaggtaaatggcactttacgatgtttatcgaaggcggccgcatcacggattatgagaattataagctgatgacgggattgcgtgaaatcgccaaagtccatacgggagatttccgtctcacctctaatcaaaacctgattatcggcaatgtctcgagccagaaaaagaaacaaatcagcacattaatcgaacaatacggtctgacagacggccggcagcattccgccctccgccgcagttcaatggcttgcgtcgcgcttccgacatgcgggctcgccatggccgaagccgagcggtatctgccgaaattgattgataagattgaagccattgttgacgaaaacgggctgcgggatgaagaaatcaccatccgtatgaccgggtgcccgaatggctgcgcccgccatgcgcttggcgaaatcggatttatcggaaaggcgcccggaaaatataatatgtatttaggagcggcgtttgacggcagccgtttgagcaaaatgtaccgggaaaatatcggtgaagaggaaattctgagtgagcttcgcaccattctcccgcgctacgcgaaagagcgtgaggaaggcgaacacttcggcgatttcgtcatccgcacgggcatcattaaagcgacgacagacggcacgaattttcacgaataagatgagctcttaaagccaaggatagagacacactggcggtgcgttctctatcctttactaagcagcataaacgctgcaccgcgtcatgaaacagatggcgcagcttgcgaaaaagcctgttttcagagaaaacaggctttttctttttccggaaaaaatgtagctgaaggaaaaaaagttcgccgtgagcacgttatgagaaattttaaataaaaacgggtaaaataaaagaagaatggttgcgtgcggaaaatatattgaatctgcccgatcatcggctccggcctttggcaaaggcagagaacaggcaataatgatatgatgcagcagatgaaggaggtcatgctttggacatatttttagtcgtactcgtacttttaaccatcatcgcgatctcaaatatcgtaaatcggtttgtcccctttatcccggtgcctctgattcaggtggcgcttggtatcattgcggcgtcatttccgcaggggcttcattttgaactgaataccgaattgttttttgttttgtttatcgctccgctgctttttaacgatggaaaacggacgccgcgtgcggaactttggaatttaagagcgccgattttgctgcttgcgctcgggctcgtgtttgccacggtgattgtcggcggttacacgattcattggatgattccgagcattccgctggctgctgcgttcgggctggcggcgatactgtcaccgactgacgttgtcgcagtcagcgcgctgtcagggcgagtgaagatgccaaaaggcattctgcgtctccttgaaggagaaggactgatgaatgacgcatccggcctggtcgcttttaaatttgcgattgcggctgccgtgacgggcgcattttcgctggcgcaggccgccttcagtttcgttctgatttcagccggcggtttactcagcggtgtcgtcatttcttttttgattatccgtttccggctgtttttgcgccgcctcggcatgcaggatgtcacgatgcatatgctgattcaaattctgacgccgtttgtcatctatctcgcggctgaagaaatcggcgtttccggcattttagctgttgtggccggcggcatcacgcatgcggtggagcaggaccgtcttgaatcaacgatggtcaaactgcaaatcgtctcttcaagtacgtggaatattattttgttcattctgaacggtcttgttttcgttattttaggtgcgcaaataccggatgtggtttctgtcatctttaatgataccgcgtttaacaatatgatggtcatcgggtacattatcgtcattacgctgacgttaatgattctcaggtttttgtgggtgctgtttttttggaacggcaagtggttttttaacaaggatcagagcatttataaacccggcctgcgctcgaccctgctgatttcggtttcaggcgtcaggggagcggtcacgcttgcgggttccttttccattccttacgtgctctctgacggctcaccgtttcctgaacggaatttgattctctttttagccgcgggtgttattatgtgcacattggtactggcgacaatcgtactgccgattttgacagataagccggaagacaatgtgaaagagaagaaagtcaaattgctgacagcgagacggaagctgataaaggctgccttaacggccattaaagaaaatatgaatgagacaaacaaaacggcttcttttgcggttattgccgaatacaatgagaaaatgaaaaatctcagatttcagcagtccaccgtcaaaaaccgcacgaaaaaagatgagcggaaagtccgcgcccaagggatacaggctgaacaggaagaactgctgcggctgattgagcggggcgaaataccggaagaaacggcagacagccttcaggaacggtttgatgaactggaagtgctgtatacgaatccgtttaaagtcggcttatctaagaaaaagctgaaacgcctgatgtactggatctttttcggtgaacaaaaaaagccggaaatgtcgattttaaatgaagaaggcctcatccgcaccacaagggttaaaacggcaaaagcggccattgaaagcctgaaaaaacacatgactgaagaaaataaagatgtgacgcttgccgtcatttccttttacaatcacttgattttcaggctggggcactcgtatcacgaacagagtccgagccgccgttttgaaaatcaaaaactcgaaatcaaactgcgggccgtgcaggccatccgcaacgaaatccaaacattattcgaagagcgggaaatttcccgcgatatgtcacatgagcttcgccaatacatcaatgatgtggaagcggccatgcttgacggaggtgaataaaaaaagtccggcatctgttcgccggactttttttgattacggacgatggaattcgacgtgatcgccgtcgcggtcaaaccagcctctgaaggcccagttgatccagccgccatcacctttgttggtgaagcttccgtcttcaaacacccaaatgccgtacgtgatgccgtcataaacggcggaaccgtaaaactgaacgccgttaaaatgatcttcatattcctggcttaaattaaacaccatgacgttatatttttgtccggaagcgtagaatgaagattccattaagtttttgacgaagccgtcacggttttgcgccgacttaatcgcgtcagcaatcgaattgccgatgccgagcaggtcaacgtcaatgtttaatccgacatcttttgctgagacatctgatgattgctgtgccatgttttgagggaccggggtttcttttgcggatacaaaggacagaggagtcagagacaaagcggcgccaagggcaacggacatcgggatacgcatacgtttcatatgatttcctccttcaattgtgtggtggctacagtagcgatttacccggacagttacccggttaaccttaatttttgaaaaataggaaaataataacgtcagtggtgcttgggcactaaagatggtttttgtgataacgatgagcgtataattggtttcttacggcggaaatgtgagataataataaccgtttacataatgactagaaaggatggttcaacgtggcaaaaagcttaaaagatactgtaaagcttcataatggcgttgaaatgccgtggttcggccttggcgtgttcaaggtggaaaacggaagcgtagcggcggactccgtcgaagcggcaatcagaaacggctaccgcagcattgatacggcggctatttataaaaatgaagagggtgtcggcgaaggcatcagagctgcgggcgttgccagagaagagctgttcatcacgtcaaaagtgtggaatgaagatcaaggatacgaaacgacacttgacgcgtttgagaaaagccttgagcgcctcggcctcgattacctcgacctttacctgattcactggccgggcaaggataaatataaagacacatggcgcgctcttgaaaagctgtacaaagacggcaaaatccgcgccatcggcgtcagcaacttccaagtgcatcatttagaagaactgctgaaagatgctgaaatcaagccgatggtcaaccagattgaattccacccgcgcctgactcaaaaagaagtaagagatttctgcaaagcgcagggcattcaagtggaagcatggtctccattgatgcagggacagctcctcgataacgaagtgctgtctcaaattgcggaaaaacataacaaatcggttgctcaagtgattttgcgctgggatcttcagaacgaagtcgttaccattccgaaatcgattaaagagcaccgcatcatagaaaatgctgatatttttgatttcgaactttcacaggaagaaatggaaaagatcagcgcattgaacaaagacgagcgtgtcggtccgaatccggacgagcttctgttctaagaaaaaacagccctttacggggctgtttttctttacataaatgtctgtgtctgacgttttacgctgaacctgtatgcggctattaataacagggcggcggcgaaggctcccaaaatgatgacgttcagcatcaggctttggaacgtgcggccgtgctgcaattgatcgaccgtatcgagcacccagcgctgaggcagaaattcggcgattgtctgcaccgttttcggcataatattgcccggaaagaagcagccggccagcaagcatgtcggcacgacgatcaaattcaaaagcgccgatgccgaagcgctgctgttggaaaaaccgacggcaataaaggcgatcccgatcgcgcttaatgcaaacagcatcatcaggatgaacagctgccacagcgggaatgacggatgaatatgaaaagcggcgcccataaagagaacggcgaatagaatttggacggccatgataatgatattcaccgccgcgtttgccaatacatactgctttgatgtgatcggcgttgacagaagcctgtagtacgtcctgttttcccgctctttaatcatcagttccgtcaggttgccggcggaatagagcataatgataatgagatacccgatgactgagtaggtcatttctttatggttcgatgtatcttgtaaaacagcggactccgtttgaatgggagaatgcttgaaatcggcgtacatcgcctgaaaggctttcgcgtctccgccggaagatttgccgattgaggcggcgctgttcatataattgtacaaataagagctgatatatccggtgacctgggcgcctttcagcgaagtcatgccgatgtgagccggtttcccgtcttttacgctttgggagaagcctttttcaaacgtaatgagcgcctccatttttcctgaagcgatcttggatgaggcggacgcagccgtttcctccgaaatcttcacatgatccagtccttttaaaaacgtgaccgtatcctgtgccacttctccgccgtcctgattgagaatgccgatattgagcgtttcggctccgccgttggcattggtcatgaaggagaggaagacgccgatcagcggagccccgatataaagaatgagctgttttttgctttttgtaatccctttgagagtgtgtgcaaacagccaccagaagtttgtcatattacagtccctcccgtctttgaaacgtaaatgcggcgatcagcaaaaagagtgccgccaatgctgtatttaaaccgagtgcaggccatgccgctgatacatcatttgcgtaaatgatgctgttaatcgccttattgatccaggataagggcgacagggcggaaattcctccgccttcatatttgtaataggcgccgccgataatggacatcacctgaacgatgatgacggtgattaatctggcgctttcgggttttctggtcaaatagctcaggctgagcccgaagctgacggccaaaagaatttcagaaacgagaatcaaaagcacaaggcccatgtggctgccccaattcgcttttaagataaatttgctgaaggcgacaacggcaagaatcgtcagaacattcacagccaaaatgccgagcatctttccgagaaagatatcgcttttccggagcggggcggcgatcaggcgatctgcggtgtgccgtattctttccccgcggaataagctgcttgcaaaaatcgaggcgtacagcccgatcatcgtcgtcatggatattgcgtaaaaatctttcgctttcggttctttcgctttgtgtaaagacgtctgcttcatataatcgcttttgatttgtccggcggaaggcgccttatgcgccttgtaagcggcggcgcctgctttgtattgattggtaaaagcggtcagcatgccttggacgatcgtgccgtttatgccgctccggtcatttgtaaagacttgaaaaccggtgttttttacagtgacgaaagcatccgcctgattttctcgaacctcgtttttgccttttgcctccgtgtccgctttttgaaaatagacatgctcttttttggcggctttcataaactcagtaaaatcatgagaaagagggccgtttgactggtccgtatatacgaccttgatgttcccgaccgtcacctctgaatcaaaggcgtttgataatgccgcagtaaaaatcagcatgaagacgatcggaaaagcaagcatgaaaataaaagtccgtctgtcgcggaaactgattttgatttctttcccggcgatgtgcagaatattcatttgcaatcctcctttcagtggggtcagtcgcgcaggcttctgcctgtcagcgtgagaaataccgtttctaagtcaggggcctgttcctgcaaggagcggatttcaattcctttgtccatgaagtaccggatcaggcggtttaaattgttgactcctgtgtcagagctgattttcacgctgttttcttccagtgcggcggctctgacgccgggcagctcctgaatatcgccgaggctgatgccgtttccggatgacagctcaatcacgacgtccttcgtgtcggtaatgatggaggtcagctgttcttttgtgccttctgcgatgactttcccgtggtcaatgatggcgatgcgcgtgcatatttcttcaacttcctccatgtagtggctcgtgtagatgatcgtgcagcccatttcattcagctttttcactgattgcagaatataatttcttgattgcgggtcaatgccgaccgttggttcatccatgatgatcaatttcggccggtgggcaagggcgcaggcgatattgagccggcgtttcattccgccggagaaatgcttcggcaaatatttgtgtttatcgctcaagccgacgaatgtcagggcttcctcgacccgttctttcagagccgcccctctcaggccgtacagcccggcgaagaacttcacattttcataggcgtttaattcttcgtaaatcgcgaggtcctgagggacgatgccgatattcattttcgttgctttgctatatttgaaaatatcttttccgagaaacagaatgtctccgcctgaaggttttaaaagacctgagatcatattgatcgtcgtgctttttccggctccgtttgcgccgagaaacccgaaaatctcaccttcttttacggcaagcgacatttggtcaacggcggtataatcaccgaatttcttactcagctgtttgagctccaaaatgttcatgtttccacctctatgtcttgtgatgttcttattataaaaaaaagaatgaacggccgttagtgcagctgttcattcctttgacatgagaatcttcatatttttcacatgaaaacattcacttattcaaccggaagcaatgtcgtgacggaaaaaccggccgtgccgtcaaaaataacggttccgtgcaggacggccgcccgttcttccataccgagcatgccgaggccttttttaaagcggacggcgccgtttccgttatctttcacttccgctttcacggctttattcagcacatggatatcaatgaaaatctgcgtggcatcggcgtatttcattgcattggtcaaggcttcggttacgttttcctgaatgactctccaatgcatttgcgtcagcctgtccaaatcgcctcgatgcgtaaacggaaccggcatcccgtttttggccgaaaattcatcaacaaacgttcttaatctgtgaatgcccatttgttcagcgggcggtttcatatttttcagcgtaatgcggatatcctctatgccctctttggaaatggtaatggcgttttggagcagttcagccgctttgtccggatgggagccgagcatccgtttcgccgcttccatctgaatgagcgcgcctgtcatggaatggccgattttgtcatggatggcttgggacaatctgtttctttcttcgagtttgccggtatactccgattgtttgatatattctgtgctgctgtgcagctgtttcgtcagtttttcaatgcttgagcgcatgctgtctgactgctcttcatattttttcagccggtcgctggaccgggcggccaaaacgaaaatcgccagacagaacaaagttatgacggtataggcgggaaggtcgccgtacgggataaataaaaacggcaaaaacacgagcaggcagaacacatagcggtgaaccggatattcggcaagaacggcaaaaatggcgggcggtaaaagaaacagaaacgccggatggcctaaggcggaaagccaggcggtcaatgccagcgccagcagggtgatcccgcgcctccaagcgggcggcctgatcatgcagaccgcaatgcccaaagacagataaagcagcagaaacaagacggcgtacggtgtgtaaaggcggtctgccgatacgaacaaaaaagccgtataaaaaatggcgatcagtctgctcatcagcatccaaaaatccataccgttcaacgcccgttatccaccttcccggtgatataataaatcgcgatctgcgttctgtgctcaagccccgttttccctaaaatagaggaaatataattggccgtcgtcccttcagaaatgaaaagctgttttgaaatttccctgttcgagaatcctttcgcaataagcgacatgatgctgagctctctttcagtaaactggctttcatcaatctgatgcgcggcttccgccggccgggtaaggctgtcttttattttatccagcacggtgtcctgaagaatgctgtgcccgttgaagacgcttttgatcgcatcgcggatccgttccggttcggtattttttaataaatatcctttcgcgccgtttttaatcgcttctaaaatatactcatcgtcgtcaaatgtcgtcaggatcatcggcttcgtatccgtttcctccgcgatccgttttgcggcttcgacgccgttcatcaccggcatgcggacgtccaacaaggcgatatcgacgggattgtgtttacaatactctgccgcctcgagtccgttttccaacgttgccgatacagtaaattcctcatatgtatgcaaaatgattttcattccttctctgatgaaagaattatcatccgcgataatgacattaatcttcatggccgcaccctttgtgtgtttttgtttcattatataccatccgattttaaatcaaaaagcctcccggcgaaaggtgcgcggaaggcggagcggtcaagcgggttttttcaattggatgaaaaacagcatcagaaaagaaatgatcacaatacagatcacccacacccaggcgagtgtttcattgccggagtccatcgcgacgtaaatcgctgtcggcagcgtttgggtgacgccgggaatatttcccgcaaacattaaagtcgccccgaattcacctagcgcccttgcaatactgagaatgcttccggtcaagagggagggaaaggcaagcgggacggaaatgcgggtgaagacctgccatctgccggctccgtctactttcgccgctccctcgatgtcggcatcaaccgcggcgaagcccgttttagcggactgatacataagcgggaaggcgacaatggccgaagcgatcaccgcggccgaccacgtgaaaatgacgggctggtgaaaaatccgctcaatcgcccggccgaaaaagctgtgttttccgaaaatgataatgagaatgaacccgacgacggtaggcggaagaacgagtgggagcataaacagcgtctccacagccgttttcccgggaaatcgcgctttcgccatccaggcgccggcaagcgtcccgagaatgatgacggcgaagcccgacgccaaagccacctgaaacgacagtacgacgggagtgaaaaactccgaagccgtaatgttacttggcagtaaatccatatttcttaaacactttcatcgcttcatccgactgcagatactgataaaacgcttctgcttctttacggtgctttgtatccttgacaatgccgagcggatacacgatcggatcgtgcgttttcgccgacgcttcatcggtgattttcacctttttcgaaatcagcgcgtctgttttatagacaagcccggcatcgacatttccggtttcaacataagacagcacctggcgcacgtcttttgcataaacgactttatcttttaccttgtcccacagggataatgccgtcaatgactgtttggcgtattgtccggccggaacggattcaggcgtgccgagcgcgattttttccgtgctgtcttttttcaggtcattcagatgtgtcaggtgtgcgctgtttttctcaggtacgatcataacgagatcatttttcaaaagatccgtgctgtcctttttatcgatatctccgtcatgaacgagcttttcgaatttatcttcggctgccgagaagaataaatcagctcccgcgccttgcgaaatttgtttttgcaatgtgcctgatgatccgaagttgtcttgaatggttacgtttgaatgtgatttttcgtagttggtctggatttcttcaagtgcatcctgagcgctggctgccgcagaaacggtcagcgtgactttttcgttttgtccgcctttggacgattgtccggatgagcagcccgcagttgcgaggaaaacggccatagccgcagttgtgagtagtgtcgctttctttttcaacattgtgcaccccttatagctaaatatcattagatcaaactaattataacgcaattgtgcgtgatggtgcggttttttttcaatatctgaacagttataataaaaacggagcgtgataatatgacagaagccacttcctatacaatagaagaagttgcgggccttttgaaggtctccaaactgacagtatatgatttgataaaaaaaggactcattccggcgtacagggtcggaagacagatgagggtcgatgaagaggacttaaaacaatataaagcaaacatgagaatgtcaaaaaagccatccgcagcagaagcgcctgacccgtcccgcgggcgggagccggaaaaaaggcagtccgttatcatcagcgggcaggatgtgtcgatggacctcctcagcaaacagctggaacaaacaatacaggcggctccgctccgcaagtacagcggcagtttgaacagcctgatcgagatgtaccgcggggcttgtgacatcgtcagtctgcatttgtacgatggggagacggggcagtataacatcccgtatgtgaagcgcattctttcaggggagccgtttgcgctttttcatgtcgtgcttcgtcaggccggattatatgtgaaaaagggcaatccgctgaacattcagggctttcaggatttgagccgaaaggatgtccgtatcgtcaaccgcgaaaaaggatcaggcgcgagggtcctgctggatgaacagctcagatcattcggcattacgccgaatgatgtcgccggctaccatgacattgtcacggatcatctgtcagcggcttcacaagtatcaagcggaaaggcggatatcggagtcgggtcgcagcatgcggcgcatatggcaggcacggactttatcccggtgatcagtgaacagtacgatgtggttgtgttaaaacaaaaccgggagcttgttcaaagcgtgcaggacatcctcaattctgaggaattcaagtctcagctttctcaattatccggatatgatacgaaaatgaccggacggctcatatatgaaacatgaaaaatccctccatataacggagggatttttttattgcttataaaaccgcaaaaggtcgccgtttaatattttatcggaaagcatcagctcttgttccgctttttctttctcatcgctgcacgcgctcatgtcagaaagcggttcgcccgttttacggctgtaacacgtatttttcgtataaatatgatcatccgtgataaagctgccgtttctcagcaccgcaaacggggtccgctctccggaaaacagatcattgccgaactgaatgctgcctttcgtttcaatgccgagcaggtgaagcagcgtcggccttacatcaacctgtcccgcggcggaagcaatcgtttccggcgcacggtcggtcaccccgggaatatgaatgataaacggcacgcgctgaagctgaaccgtatcaaacggagtgatttcctctttccctaagaattcggcaagtccttgattatgggcttcggatataccgtaatgatctcccatcaggacgatcatcgcgttgtcatacagtccttcttttttcagcttcttgaaaaagtgtttcagagcctcatcttcatagcggaccgtcgtcacatagcggtttaataactcgctgcttgtgtccggttcctcaatgagctgatcctgtttttcaatttcaaaaggaaaatggttggtcaaagtcagcaggctcgcgtaaaacggctgcggaagtttctttaatttttcagctgactgttcgagaaactccttatccttcaggccccagcctgttgaattttcctgtgtcaccttaaattcatccgcgtcgaaaaaacggtcgattccgaatgccccgtacatctcatcccggttccaaaaggccttatgattggcatgcagaacggctgaatagtattgatgatcttttaacatatggtacatcgtattgaaccggtggccgctttttgtgaaaaaaacggcgccgcttgaggacggatacagcgaattcgcagtaatgaattctgaatctgaggtttttccctgttcagtctgctgataaaaatgagtgaagtcataactttttttccgcagtttatttaaaaacggggtaatctcccgtccgttgacccgctcatccattacaaaacgctgggttgattcgagcgtaacaaaaatcacattgcgtcccttggcgagcccgaactttgattcggacggcctgctgtagtcggcttgagtgtaatttgcgaccgccgcaaggctgtcttcgtcggcaaacgctttagctcctgcattcagcgtctgcgaaatggtgtcatacaaatgaaagtggaacaggccgattccttttacgagcgcttcacgatcaaaagggtgcttgaacagcttcggctgctcggcctcagacagcgcaaggttgcacattatgaggccggctgatgcccacgcatacgctttaacggtacgggcgcccgcttttcctttatcggctttatgccttttaccaaggtaaaacaaaaccgcaatatccaaaaataaaacgatataaagcgggtgaaacagctcttggacgctgcttcccatatcacccatattgctcgcctgaaacaaaaccggtatggtgataaaatcaatataaaaaccgtaaaacaccgtattcgcgattaaaatccccgtcagcatcacattcgccgcaagcagaaagatccgctgttttttttccgtcagcagcagggcgatgccgaacagcggcacaatgaagctcagcggattaatgagaagcagacattcctcaagaaccgaattgttctgcagatcaaaaccgagcttataaacggcataggttttcatccacatgaacaggatggacaggcataaaaaccgatgattgctgaaaaaggttttcttcatatgtatgactcctcacccgaaaagcgaaaagacgctttttgtttaagagatgcggccgtgaaccagttcgtataaataatagcaggatacaatcgttaagccggccagcacaagctgctccgaaaagctccccgttctcatataaaggggaagacgaaagcggatggcggacggaaacagcagtttaatgccgttgacggtccatgcgtcaagcacaagatggctcgccattccgatcatcagtccggcggaaatgctcggattcggaatataggttgccgtaatgaaaaacataataagcataaacagcaggctgtgtgtaaacgttctgtggccgaacaccgtgctaacgattttggacagaacgggcagcgttctgccgattttgcttttcgtatggcatatgtcgggaatcagcgccccgagggcacccgctgaggtcataaggaccggatcatacccgtaataatacgcaattgcggaacaagaagcgatgcctcccatgatgtgtgtttttcctgtcatttttcgcttctcctttttatttttgccaaaatcccctgaattacaaatatatcaagagaatgcatgtttgatcaacaaactttacctgttccgccaaaaggaaggagacgcggattccgcatattctgccgcggaaaaagacacattataggtgtacctatatttgataaagaggtgatacagatggctttctttaacaaagaaaaaggaaaaaacagcgataaaaacaaaaatgtcattcaaggcgcgcttgaagacgccggtgcagccctgaaagacgatccgcttcaagaagctgttcaaaagaaaaaaaacaaccgctgaccatataagacgggtagggcgaacgctctatccgttttccatctaatttttccctttgacagatctttttatctctgataacctctgagtagaattgaatgataaaaatcctcactctttctcggtgaggtagaggttgcgcttgatgatgagtcgcacatgccaggctgataggggccgcgaaacatgtgttaaaggcatcagcgccgaagtgtaaagaaagccgatccttctttatgctgggactgtatctgaataagtgcaggactgccgcgtgctttttcgcggagggctatccggagatcaagggtgtgtgtgtttctttaagcatggacttttgttcaggctttttttgcgtgtaaatatgatctcggggtctggtccgtacgaatgaacaaccaggaggtacaggaatggaacagacgaaaaaatggggtttttggttattaacggcgtttgtcgtaggaaatatggtaggctcgggcatcttttcgcttccgagttcgctcgcaaaaatcgcgagcccgttcggcgccacatcggcatggcttttaacgggagccggtgtgttaatgatcgcgctggtcttcggccacttatccatccgcaagcctgagctgacggcggggccgcaaagctatgcgcgtgcgctgttcagcgatcggaaaaaagggaatgcagcgggcttcacgatggtgtggggctactgggtggcgagctggatcagcaacgtggcgatcatcacgagccttgccggatatttaacatcatttttcccgattttaacggataagcgtgaaatgttttcgatcggcggtcaggcggttacgctcggccagctgctgacgtttgccgtatgtacggttttattatggggcactcacacgattctcgtcaccagcattaacggtgcgagtaaattaaatttcgtcacgacgttttcaaaagtattaggatttattttctttatcattgcaggtttatttgtgtttcaaacgtcgtttttcgatcatttttattttccggttcaaacaggtcctcacacagttgagggaattggcggacagatccacaatgcggcgatttcaacattatgggcgttcgtcggaattgaatcggcagtcatcttatccgggcgcgcccgttcgcagcgcgacgtgaaacgcgccactattaccggattattgatcgcgcttggcatctatatcatcgtaacattgattacgatgggcgtgcttccgcatggtaagcttgtcggctcggaaaaaccgtttgttgacgtattgtacgcgatcgtcggcaatgcgggaagcgtcatcatggcgattctggcgattttgtgtctgttcggaacgatgctcggctggattcttctcggctctgaagttccgtatcaagcggcgaaatcaggagactttccggctgcttttgcaaaaacgaataaacagggaagcccggttgtgtcgttaatcgtaacgaacgtgatgtcacagatctttatcttttcagttatttcccggacgatcagtgacgcatttacgtttttaacgacggcggcgacgctcgcttatctgattccgtatctcgtatcagcgttttacagcctgaagctcatttttacgggtgaaacgtatgacgagataaagggttcaagagtaagagacggtatcatcgccatccttgcctgcatttattctttttacgtcattattaccggaacggccgatttaacgacctttattctcggtatcgggctgtttttcgtcggtttgctgttatatcctttcgtttcaaagaaatttgcaaacaacagacaatcggtatgacaaaaagacatctcacgtctgtgagatgtctttttttgtttgcggcagcgggttacttttttacggcgtgtatataatgaatggtctcgaatgcggttaaatggtcagtgcgtccgctgaaaaaacggtcattgacgtccgccggagataaatgttcataaataagcagacctgatgattctaatattttttcgatttctttataactgaaacacgataacatcggttctccgcttgctgcagccattttcaccatgttttccactctgtttgacagtcctcttacttcaaagagggactcatctgcataatcaaacacgatagagcttcccggcgggacttcggcaaataattgtgtgagcaggcgggcgagatgctttttcgtaagatagtatgacacaccgagcaggctgaaaaaggttttttggcgtgaaaaaccttcctgatacagacggctgaaagaaagcgaagcggcgaagtccatcggtacaaaatgaagatgatgggaaatgccgaggttcagatgtttcaatctgtttattttgtcttcctgtgaagcgggatgatcgatttcaaatatgtctaaggcgtttgtcacctcaggatgcctgaaacaaaaagtatccagccccgcgccaaggatgacatactgtttggccccgagcttcacttcattcaaaagcacttcttcacaatatgcggcacgggctaacggtgtaggagacagctggacttgagtcacccattttaagatgtcatccggttggccttgaagcctatgggccatgtctttactgaaaaatgatataccttgaatcagatgatcgcggatatccgaatgctctttttcagaaatcagatcttgtgccataaaatcatcaaatatcaccggggcgtcgtgtttactgtggtacgcccttccgaaagcggacagcagggaagtcatactcgccttgttttctttcatataaagatcctccgttatttacatcaatctccggccgggagaatcttattatacatgttaatccgaaaatgtaaattatagcataaatgaatttttttgtcaagttttaagcgtaataaaaagccgctgtgacagcggcttcggggttacttcgttaagctttttgtgatgtagtcgagctggccttcaagtgagatcgggtctgagaaatagaagccgatcggatcaatgcggtagacatggttttgtttgacggcatcgaggttcttccagattgagctgtcaagcacgcctttgtcgtcaccgccggcctgccatggccccataaagatgtagtctcccgcgaagtcaggcagtttctcgagtgaaatgctggcgtagcccggcccttgattaatggctttttcctgcgtcagttttgtggccttcagcccgagtttgtcataaatgatgcttccgccgcggccgaagtctttaccgaatacatagatgtcttttccgtttgtctgcatgatggagatggtttttgagccgaccgctttttgaacctttgttttagcggcagcggttttcttatcccattcagccagccatttgtctgctttatcttcagtgcctgtcattttcgcaaactctttgaattgatcaatattgctgagcttgtcatatttaatggcgattgtcggcgcgattttttccagtttttcaatatcggcgccttgtgtcgtccagacaacgattaaatccggctttaagtcaatgattttttcaacggacgtgccgtcgccgatgtttgtgacaccttttgttttccctttgtaataagggtttttaaatacgttttgcggcgcgccgacaacattgatgccgagctgtttgaagtcgccgtagtagccgtcagccatgacgacgacccgtttcgggtgcttcggaattttaatattgccgttttcggctttatacgtgatggtttcttctttttcagaagaacctttcgtgtctgaagaattgccgcatgcggccaaagcggcgatgagcagcatggcaatcagcgctgcgccgattttcttgtatgtacggaacatctgacattccttctttcataaaaattagtgataaagagaatcattatcagtgtgattatatcactgctttcatagagaagcacgctcttttttaagaaaaactttctttttttatatgaaattaggtctattaaaagagaagataaaagtgctatactgaaacaagtcattgataatcattatcattaccattcttgttttgagaaaggaagaacgagtgttgggtctattgaaaaagaaacagacaatgacggctcaaggggcatcagggagtgaaatcaagtggacggcgcgttcattccgggcggctgtgctgctgtgtgccggtattgcggttttattgatcggcgcggctctgtctgtttccatcggagctgccgatattcatctgcggacggtgtgggatgctctctttcactttcagccgcaaaatacatctcatcaaatcatacgcgatctgaggctgccgagaaccgccgccgccgcgctcgtcggggcttttttagctgtgtccggggcgattatgcaggggctgacgcggaacccgcttgctgagccttccattatgggtgtgacgtcggggtcaggatttgcgatcgcattggcatttgctttttttccggggctctctgttgctgggcttgttttgtggtcctttgcgggagcgggaatcggagcgcttattgtgtttggcatcggcctgttttcaaaaggcgggctgacaccggtgaagctcgcgctggccggtacggcagtcggctatttcttaacggggctttcaagcgcgattgcgatccgttttgatgtcgcccaggatgtgaagttctggtatgccggaggagtcgcttccgtgaaatgggaaggcgtgcagctgcttttggcggtcggggttatcggacttttgctggcatttctgattgcgcgctcagtgacagtgctgagcttgggtgaggagctggccaaagggctcgggcagtacacatcgcttgtgaaagtaatcggaatgtttgtcgttgtcctcttgacgggggcttcagtctcagtcgccggagccatttcttttatcggcttggtgattccgcatatcacccgatttttagtcggggtagattacaggtggatcattccctgttcggcggtattcggcgccgttctgttagtcttcagtgatattgccgcaagactcgtcaatgcgccgtttgaaacaccggtcggcgctttaaccgctcttatcggcgttccctttttcttttatttggcgcgcagggaaaggagagggctgtaatgaatgtaaaatcgaaaaaaccgctggcggtcatggccgttacgtttttgctcatatgcatcgtcttttttatcagcttaaacatgggtgtgatccggattgcgcctcttgatacgctgcgtgtctttttcggacagggggatgcccgggatcagctcgttttatttgaattcagactgccgcgcatggtgctgtcattgctggtcggcgccggaatcgcggtttcaggcgcgatttttcaaagcgtgtctcaaaatgacttggcggagccgggcattctcggtattaacgccggggcgtctttggcggtcgttttgtttatcttctttttccaaggatcagctgttgatttaagcatggccagtacatggctgcttccggtgagcgctttggcgggggcttttctggctgcgctgctcatctatgtgctggcttggaaaaaaggcgtttcacctgtccggctcgttttggtcgggatcggcgtcaatgcggggtttaatgcgcttctcttgatttttcagctgaaaatggacccgcgggatttcatgcaggcgcttgtatggatttccggttcgatttggaacgccaattggaaaatggtgctgtccattttgccgtggctgctggttcttttaccgttcagcctctataaagccaggtatttaaatgtgctccagctcggtgatcagctggcggcggggcttggcacccgggttgaaaaggagcggcgcgttctgctgatgtgcgccgttgccctgaccgcgtcatgtgttgcggcagccggcggaatcgcttttctcggactcattgcgccgcatttggccagaaggcttaccggcccgcgccaccagacgcttatcccggtttcggctttaatcggcgcatttttatttctgcttgccgatacgctggcgagaaatgtgcttgcaccgtccgaagttcccgtcggcctggtgatttccgtgctcggagcgccgtattttgtatatttgctgatgaaaacgaaatagaggaaggagactgccgcgatgaactcattatcggcggaacagcttactgtcggttatggcgaccgtttgatagcgaaagaattggatatcgccataccgaaaggaaaaatcacaacgctgatcggtccgaacggctgcggaaaatcgacggttctcaaaacgatgtcaagaatcatgaaaccgaaatccggcgccgtctatttaaacggacaggcaatcatgcaaaaatccacgaaggacatcgccaaggaaatggcaattcttccgcagacgcctgaagcgccgagcgggctgacggtgtacgaacttgtttcttacggcaggtttccgcatcagtccggaatgggccgtttgagtgataaagaccgtgacatgatcaaatgggcgcttgaagagacggggatggccgaattttacgaccggccgatcgaagcgctttccggggggcagcggcagcgtgtgtggatcgccatggcgctcgctcaagaaacagagctgctgcttcttgatgaaccgaccacttatttagatctcgctcatcaacttgaaattttgcagctgctggacaaattaaacaaggagcagggccgcaccatcttaatggtcattcatgatctgaaccatgccgcccgtttttcccattacatgatcgcgctgaaaaaagggcgcgtcatcaaggaagggacggcggaggaagtcatgactcccggcatattggaagacgtttttcagattgacgcacagattgtaaaagatccgcgcacgaacaaaccggtctgcttaacctacgatttaatccggaatgaaaacgcaacagtatgatgaaaaaaacgcagagccattccggcctgcgtttttttattgcgcccggggctgcttttgtccggagacgcatttatccaaaacgaaaaaaacccccgccacaatcagctcctccgtcgttgacagccaaatcttttcaatcagtttatctgtcgtatacgcggtcatccagaggaacagcagctgaacggtgctggctaaaaggagaaaaggcagcctgcccgtcccaaaaaaggtaaagctatgtatcatcagccgctcaagcggttcaaaacataaaccgagaaaaataaaaagcatggaaaaaagcaggacgtacgccatcgatccgtagctcgtcccggctaatgaaaatacggccatcatcacgatgaaatacccgaataatacggcagcggctgccagggcataccggagcacctgaagaaaaaacattttcgtcccgttttgattgatcatctgttcagctccttttcacacagaggagacttgcagagacggaactctgcaagccggtgtgtgtcttcagcatttctttttgacgacagggtgtttctctttcgaaagaatatccgtaaagtctttgcccagatccagatgctgctggacgaatttctcaggaagcatggcaagccattggttcagggacacatcggcatagtggtcatccttgaagatttccaggaagacgagcggctcatctcccaaattctccacatagtggcccattgcgaacggaacgtaaccgacatccccagcctgatagttaaatgttctcgcatggccgtccgatgcaaaaaccgtcatccgtcctttaccggaaatataatactgccattcatgcgtattcggatgccagtgcagctctctcattgcgcccggttcgaccacgacaagcgctgaagcgatcgttttggacactttaaagtttgtggaatccgcgatatatactttgccgccgtccgtctcagcggtcgggccttcatccagcaggcggtaagtgaacggataaggcacttcaccgttcgggccttccacaatgtcatctttcagcttcccgggaaccggctcttcgaagatatatttttctttcccgggcaggccggcgaggtctttttctgaaaccccgaagttgttggcgatgacatcaagcggcgtgtgggcaagccagtcagttaattggaatgtgctgttttctgagaaggaaccgtcatcaaaaaccaggaggaattcacagccttctttcagcgcctgaatggagtgcggcaggcctgacgggaagtaccacagatctccttccttcacgtcatcgataaaactgcgtccctgttcatcaacaatcgtgacccgcgctttgcccgtcagcatatatgcccattccgcttctttatgccagtgcagctcacggatggcgcccggttttaaacgcatgttgacagatgccagattttcagagatcggcagctcgcgaacggtcacctcacgcgcgtatccgcccttttccagccggttgtgcacatctgagaaagagaatttcatattatccactgtgccgtgatccgtttccggcggcgtcagcatatccggattttggcggtctctttcaaggttgcgcggaatcgtgacggtcgcccctttgtctcctctgatcggctgcgggatattgcagttgttttcttttgacatgtaaatcgtctcctctcaagctttgttttttcagaaagagaatgtgaaaggcctttcgttttcccttctgctttgttaagtgatgcgttccgatgaaaagtcaacttcgtgtgaaaattaatttttcattttctgatctttcagttccgtcatcagttcgatcagggcgtcaaacttcttctcaaaccgtgtgagaagatacatggcaatcagagccggaaagccgagattgccgatctgtctgaccgcttcttctataaaaacctgatccattatcagccacctcctgacttgacttgcagtcatgtatataagtgaaagaaagagcggctcctgtaaacctgatatcccggttgagggtcttttttttgttccggcaaatacgggacataaggagtgcggaatcttagtcggaaaggagtagtttacttttttttgctttctttcatttaatttaaatagggggcggttttatggactatcaagttcttttacggtcaaaatgcaaggaaattatgaaacatccgatcgttaaacattttttaagtgacccaaagcattacgagaaatttaaaaatgtgctggaacattcagacgagaaggatgcaaaatcattggatgaccattttaaacagttttataaggaaatccggatcatcaaatatatgaactctatgatccggattttctccatcgattttgacaagcgcatccgtaaaaatcagaagcgctatccgctgacggtggatcagccggagggaggtgaagcgcttccctatgaaatgggaaaagacgcatatgaagagtttctgcggaagcagggggatttgagccagcatgtccaaaaccgtgatttatacgaagcgcttcagacgttaaccgataaacaaaaaagcgtgctgacgaatatttatcttcacggagcgacgatgaaggaaattgccgagtcgctgggtgaatcacggcagaacatttccaatattcataaaaaagggctcgacaatctcagaaagcagctggacaagcaaaaaaagggggaaaataagcagtgaacgggccatttgacttcaacaaagagaacacagataccgacgaaatggaacttttgatttcgcgtttttcgccaatgataaaaaaaaaactgagcaatacatcataccaggaaagagaagatcttgaacaagaattgaagattaaaatagttgaaaaagcggacatgctgttatgccaggaagtgccgggtttttgggaatttatacttcatcttataaatgaaagctcctgacaaaagcggcgggatgattgatattccgctctgacaacgtgagaaaaacgagaagagatgtccgtctcgtttttcttttctgtttccccgcaagacctccgcactaaaaaggtaccaaatcttatccatataatgatatgatgaaaaaaacaaagagaaaggaacgtccaaggtggaaaatgcgtcaattttaattgtagacgatgagaaggcgatcgttgatatggtcaaacgcgttctcgtcaaagaaggctatcacaacattaagacagccggaagcgctgaggaagcgatcgagtttgttaaacatgaaaccgcggatctgctcgtgctggatgtgatgatggaaggcatgtccggttttgaagcatgcaccgaaatccggaactataccgacgctccgatcttttttctgactgcccgttcttctgatgcggataagctgtcaggatttgcattgggagctgacgattatataacaaagccgtttaatccgctcgaattggcggcgcggatcagggcgacgttaaagagaacctataagcgcgaagagaaaacggcggtaaagacgtattcatacagccatttttcctattcgccgcaaaacgctgagctgatcgtcgggggcgagcccgtcagctgctccgcacagcttctgcaattgcttcaatatttctgtgaacaccctgatgtggtgctctcaaaagatcagatctatgaaaaagtgtggggatatccgtcttacggcgacaacaacaccgtcatggtgcatatccgcaaactcagagaaaagattgaaaaagaccccagcaatccgtcctatattgtaacggtgcgcggcctcggttatcggtttattcccgatcaaggagaaaaaggaacccggtcatgagaatgcgcggaaaatttctgctccactttttcggacagctgctgcttgtcatcctgctgatgtccgttttggccgtcgcttctttcttctatttggattggcgtttcagcgaagcggaagccaatgcgggactgaccaaagcgacggcagactcgtttgaagcgtggcttgataaaaatgaagacggcacatgggatgtcgatgaatttttaaagatgtcggtcagaaagcagaagggctggttgcagatcattaatgacaatgaaaaaacggactacgcctacagagtgccgaaagacgtcccgagccattacagcagaaaagacctcttatccatttatcagtaccggaattttgacaactacaagctgaattactggacggtcacgataaatgatgagacctatttgattctgttcggctggaaatccgccagtgagcagcttctcacttacatcgaatcacaggagccatccctcgcttccctttctcaatataaaaaaagcacggttgattatattaaacgggaaaaaggggcggtctaccttctcgaagacagcggcagactgctcggggatatcaacagcacgaaaaaagaacggaacaccgtcaatgagcttgaattgctgaaatacagttccaagccgtggaattacaaacgggaaatttcttttaaaagactcgataaaacgaaatggatggtcgcgtcggtgccgaaccccgtgtacatccccgatcacgagtttaacaaatcatttttgagaaatgtgatgaaaaccctctttctcttgatcggaatcctggtatttatgatctgcatcttgaccatctggtactctttccgtttcggctggccgctgtttcataccatcaaatggctcgtcaatttatcaaagggccggcttgaagaaccgaagaaccgcaaaggacagccggtcagcaaaaacaaaaaaggcaaaacaaagcagccgttccgctttttcgccgagattttcgaatcgatggatcagctgactgacacgctgaagcgggataagaaaaacagagaaaaaatccaggcgacaagggaagaatggatcgccgggctgagccatgacttaaaaaccccgctgagcacgatttacggctacagcatgatgcttgaatcgaagcaatacgactggaccccggaagaagtcaaagagatggggcagatcgtccgggaaaaatcagaatatatgtcgaagctgattgaggacttaaacttaacataccgtctcaaaaacgcggccctcccgatcgaacggcggctgatcaacgtcgtgccgtttatcagaaacgtcacgaacgatttcacgaaaaacacgttctcggaaggctatgacatcgcctttgaaaccaaaaaggaagacattcttttcgccattgatgaagcgtggttccgccgtgttctggagaatctgctggcaaacgcggttaagcataataagaaagggaccgccattcgggtcgtgcttgaggaatcagccgaacagctcattctgaaagtgaaagataacggaagagggatggacgacgaaacgattcaccagctgtttaaccgttattaccggggaacgaatacgaaaggcccgtcagaaggaacgggactcggactcgccattgccaaggagctggtacaccttcataacggaaccatccatgtcaacagcagaatcagcgccggaacggtgattacgattctttttaaaaaagattaagtttggacgccgctttgtcgggaataacaatagaagactgacaagcaaaagaggtgttcacatatggaagcagcattacgagcagatacgagagcagttatcggagaaggccctttatgggacaaggataaggaatgcctgtactgggtggatatactgggcagccagctccatatcttcactccggctgacggaatcaaccgttccgttaaattcaaatcatttgtcacggctctggccttgtattcaaaggaagagctggtgatgacgatgaaagatgggttttacctgtacaatcttcgggaagacacattgacgaagatgaagcagccgagagacatgcgggaagatatccgtttcaatgacgcaaaatgcgacccgtccggcagattatgggcgggaacgacgagcatggaaggcaaagaagaggaggcttcgctgtaccgtctgaatactgacggcagccttgccaaaataaaagaccaggtctccacctcgaacggtttggattgggatcgggaccgaaacttgatgtactatatcgatactccgacgcaggaaatcgtctgttatgcatatgatcctgaaaccggagccgtatcagatccgaaaacggtctaccgctttccggaattgcaaggatctcccgacggaatgaccattgaccgtgccggaatgctgtgggtggctctgttcggaggcggccgtgccgtccggattgacccgtttttgcataaggaaattgcatctatcgaagttccggcgaaatacgtcacctgctgcgcgttcgggggcagagacttaaacacgttatacattacgaccgcgacggaaaaattaacggaagccgaaagacttgagcagcctcatgcgggcggcctgttttcagcagagcttgagacgggcggctgggagccggttccgtttgcaggcatgatgtaaaaaaagccctggcatatggggaagttcccattgtgccgggcttttttgtgttaaatggagcggatgatgccgccttcaacccgctgtgcggtgccattaatggcagaagccgctgatgaagcgagaaatacaatcgtattggcgacttcttccggggttgcatagcgctgaatcaaagatgtcggctcattcactttaaaataatcccggacgaagctgtccgtgtcttctccggcagcctttgcggctccttccatgtaagaagcgacgccttcggtccatgtcggtcccggcagcacggagttgaccgtgacatttgtgcctttcgtcatttcagccattccccgggacaagctgattaacgccgttttcgtcattgaatacggaatcatttgcgcaagcggtttgactccggcttcactggagatgttcagaatccgtccgctgtttctttcgagcatttgcggcagaaaacgccggcacaggcgcacggcgctcataacattcacttcaaaataccgagtccattcgtcatcagacacctcagcgaagtcctttacttcaaaaaaaccgagattattgacgagaatatcgacttccccgattccgccggcgcgctcgatcaagtcatccgcctcatcctgacgcgataaatccgcagcgatgccgtgaaccgttccgtaagcggaaagctcctcaacggtccgttccacagtttctttttttcttccgtttacaatcacctcggcgccttcggctaaaaagctttttgccgcggcttttccgatcccggaagttgatcctgtaatcaacacgagctttcgttcaagctgtaattccatgataatcctcctttttacgccattgtgtaacagtatacatgatgaattttagtgtgtacgaacaatttgctttcatgcaaaaaggccggatatacaagccttaaagacttatagtataattactgcgaaaaaaggatacgaatgtcaaagagacaatcgtttaccataatcagggggagttaaaagaatgaagaagatcactgccgtctgggcggcgctcttggtcaccgcctttgtgatcgccggctgttccggcgcacaggaagaaggaagcgcggccaaacaaaaagccgtctcaaccgaagcattcccggtaaccattaaggatgccgcgaacgaaaaagtcaccataaagcaggcaccggaaaaaatcgtttccctcatgccgagcaatacggaaattacatacgcgctcggactgggagataaggtcgcaggcgtcacgacaaatgatacatatccgaaagaagcggtaaaaaaaccgaaagtcggagatatgaatgtgaacgctgaaaaagtcatcgcgctgaagccggatctcgtgcttgcccacgcgtcctctatgtccgcttccgccgatgcgatgaagcaactgaaagatgcgggcatcaccgtcttaacggtcaatgatgcgcaatcgttccaagacgtgtacaaatctatcagcatgatcggaaaagcggccggcaaagaaaagcaggcggataagctgatcaaatcgatgaaatccgacctttccggcatagaaaagaaagcggcggccatttctgaaaaagacgaaaagaaagtattcgtcgaagtgtctcctgacggctacacgacggggaaaggcacgtttatgaacgaaatgcttaaagatatacacgcgaaaaatgctgccggcagccagaccggctgggtgcaattgacggatgaagcgattgtcaaaatgaatccggacgtcatcattacgacagacggcgtaaaggccgctgaagtggaaaaacgcgccggctggggtgccgtcaatgcggtcaaacaccacaatgtctattctgttgatcctgaccttgtcacacgctcaggcccgcgccttgtcaaaggggtcgagaagcttgcagaaagcgtttatcctgaaacgtttaaaaagtaaccgcccgctggcctacacggtcagcctgctgtttttagccgtttgtacggcactcggcatttcaatcggcagtctgcatattcctttatccgacgttttttggatcgggatcggccggacatcctctgttgatcctatgaatgtaaatattatgatgaatatccgcctgccgagagtcgttctggctgcccttgtcggagccgcgttatctattgcgggggcggcgtttcagggacttctgaaaaatccgctcgccgacccttatacactcggggtatcttcgggagcctcggcgggagccgttatcaccttgtttttcggcattcagattcccgtcatcggccggttcacactaccggttgtcagcatcgccgcagcgattgcggtcatggcggcggttctgtttttcagccgcctcgttcatgcgtcgatgtcggtttcgacgctcattttgacaggcatcatcatgaattcttttctcggggctctcatttcgcttgtgatcgctttaacgggaaatgatctgctcccgattgtccgctggctgttaggaagcgtgtcaatgaggggctggggctatgtcgcgctgtttctgcctttttttctggccgggacggcgcttctgcttatcaatggcagagaattaaacattatgacttatggagaagaaaaggcaaggctgttaggcgtcagtacgggaaaaagaaaactgctgatgatcgccgccggatctctgctgacgggaggagcggttgccgtctcggggacgatcggatttgtcggccttgtcattccccacgtgacacggcttttatggggaacggatcatcgccatttactgccgctgtcagcattgacgggcgccgggtttctcattttggcggatttgttttcccgcaccgtcattgagcctgtcgaattgccgatcggcattatgacggctttggcgggagcgcctgtatttgccttgattctgcttcgccagcatcatggagggaaacgcttatgatcagggtgagcagcctgtccggcgggtacggaggccggatgattgtggaagatgtcagctttaccgccggaaaaggtgaatttgtcggcatactcggtccgaacggctcgggaaaaacaacgctgatgaaattgctgacgggaatgctctctccgtcaaaaggtgaggcgctcgtagcaggcaggcccgtcggcggatacaagccgcgggagcttgcgaaaatcatggccgttttgccgcagcatacggagcaagcctttacattttccgttaaggaaacggtgtccttcggcagatacccgtatcaaaaaggactcttcagacagatggatcaacatgacgaagacattgtccgggaagcgatggaaatgacgggcatcgaccgatatgcgcagcaatccgtccgcaatctgagcggaggggagcggcagcgcgtctatctggcgcaggcgctggctcagcagcctgaggtgctgtgtctggatgagccgacgacctttcttgatctcaaatatcagaaagacctgcttgatacggtgaagcggctgacgagagaaagaggcctgacggtcatcagtatttttcacgacctaaacgccgcaggccaatattgtgatcagcttctgatgatgaaagacgggcgcgcttttccgaagcagacgccggatcaggctttgaaaaaagagacaattgaagacatttacggcatcactgtcagcgctgttgcccagcaatcgtcgccgaaaccgctgatcgctttcatgccggaagggcgggaggaaagagagcccgtcagcgttccgttcgcctctctgataaaaaaaagcggaactaccgtaacgcttcatacagaacggccgttcagaatgttgtcaaccgcatctgacggcccgggcttttcgtggagccgccggctttccggctcagcggctgctggtttgatctgccgtacgtttgattcggtcacaattgccgtgactgcgcagcataccgtttgggtgctgatcagcggacgtttatcggaacagggatttgtacggctgttaacggcagcggctgaagcgagaatgcaggctctttccggcagacaggcaaaaggcgacattgtcatttgtgccttgcagacaggagaggcgatggacgtccctcacgcggaaagagccgtcagaagaggaaccgcggcatgtgtaaaagcggcggaagaaggaggaatacaacgatgaagctgtatacaaaaaccggcgataaaggacagacaagcctgatcggcggcagaacggataaagacagtctgcgggttgaaagctacgggacgatcgatgagctgaacagctttatcgggcttgcgcttgcggagcttgatgattgtgagaattgcgatgatgtgaaagccgaactccgaaacattcagcatgagctgtttgactgcggcggcgacttggcgacggtcactgaacatagaagctatacattaagagagacatctatttccgcattggaagactgcatagaccgttacacggctgaagcgcccccgcttgagaaatttattcttccgggcgggcataaggcggctgctcagcttcacatcgcgcggaccgtcacgagacgggctgagcgtctcgtcgtcaaactcggcaaaacagaagagataaatgatacggtgatgcgttacttgaaccgcctgtctgattattttttcgcggcggcaagagcggtcaacgcaagacaaggcgttcaggatatagagtatgaaagaagcgccgcggtattccgtgatgatgaataacgttttgttcagccggcagcagcaagccggctgtttttttatagagatatccatcaattgaacctttattgacagaaggaaaatgtatcttatgcattattgactgaaaaattaaaaaatgagatattataagaaacattgtaaaataatgggggatttgatagatggatacatataataagagcgagagcatctggaataaaaatttcacccttctgtttatctcaaggctagttaaattgtcaggcgacggttttgcctttaattccattctgtggtttttgatttttgacggggaaggcgcgatcggcacgtccctgttaattgcggtcacgttccttccggaggcgatgctggcgccgattaccgggccttttatgaagcagcatacgctgaaattctggatgtatttctccgacctcacgcgcgcggcggtcgtgttgatcattccggtctgttattttaacggtttttctcctttatggtttgtcatgcttctcatgattgtgcattcagccacgggagccgcttataatcctgcatctatctcgttaatccccaatattgtcggagaaaacagcctgcagaaagcgaatgcggtcatccagtcatcaggccagatcgtcaggcttgccgccattacgctgagcggggtgttcttaacttttatcagtcccgcttattctttgtttatcgctcttatattctatcttctatcaggttttctcgtactttttatgtcataccaagtccagcatgccaaacaggataccgtcgccgtcagacagcgcgggacgtatttcggaaggctcaaacggggtttcgttcttgtcaggaaacaccagattttatacccgctcgccatctattgtatcttcatgaattttgcggccgctccgtgggaggcgctctctgccgtttatgtcgccgaagatttaaacatgccgccgatcatctactcgcttttgaaagcgacaggcacgggcggagcctttttaatgggttttattttggctaaggtgaaggtgaacaaatacggtctcttgtttgtgtcagcgggaatcatagaaggagcggcatttttcatcaccggccttaacacttttctgccgctcgtcttcctcgccgcgtttgcgttcggatctgccgtaagcgcgattaatgtgccggaatatacgattattcagacgtctgtggaccatgatgaccagccgcaagtctatgccgtcatccatatgatctcaaacatatccattccgctcggcgcggttctttgcggatacgcggctaacgccttcggttccggaaaagtcattgccgccggcggtctcgttgaagtcctatccggtctcggaatattgttctttacgaagctggccaaagccgaacgctcagatctcatcagagaaaaagaagcgagcatcagaatatagatttttcgtaaaacgccctgcgccgtccggtgcagcggcgtttttttatgcgaaggtccgggggcttatacgactccggtctgatatgaaaatcaatctctgactcgttttgccggccgcgggatttgtttatagtaaagacaaggaaaacgaaaggaggatctgcatgaatataaatggtaaaacggcaggcggctttctgctgattgtgttcggactttctgtctttttcggaggaggccatttcgcatttatcatcccgctggcgatcggaggcctgatgctttactggggaatcaaacgtttttcaaaaggccgggcggtatcgggtatcatcgcgggcgtcatcggagctatgattctcgtcggttctcttccatttatcgttgcgatcggactggccggcgccatggtgtatttcgggtggaagatgatgaagcagggcggctcagacaccgcttcccgccagtatgaaccggaagcggcatcaccgggctatcaatccggatttgactctgaatgggaagaatttctgaagaaaaaataaggaggaagacaaaatggtcttaaaaagaataagaaatatgttcgtcgcatctgttaacgaagggcttgataaattagaaaatccgaaaatcatgctgaatcaatatgtgcgtgatatggaaagtgacatcgctaaggcgaaacaaacgattgtcaaacagcacacgatcgtccatcagtttaagaaaaaacaggaagatgcctctgaaacggcggcaaaacggaaaaaccaggctcagctcgcttttgacgccggggaagaggagctagcgaaaaaggctctgactgaaatgaaataccttgagggaaaagcggccgaacatgaaaaagcgtatgagcaggcgaaaacacagctggcagagctgaaagagcagctggaaactttagaaacgcgcctccgcgacgtaaaggataaaaaacaggcgctcatcgcccgcgcgaacgcggcaaatgcgaaggaacatatgaacgcttctttcgacaaaattgacagcgaaagcgcctacagagagttccttcgaatggaaagccgcattgaagaaatggaagtccgcgtcaaatacggcacttcagctgaggcaaacacagaatacagccgctcccaatattcagacgaggtggaagctgagattgaaaacatgcgctcgctttctctggaaaaaacagagcgtcaaaaagcggctcatgaataatgtgcacaagggaagatcggcgcgtttacgcctcttccctatacgcacgtatcaattctccggcttttcctttataataaaatgaatgaaaaaggatggaacgtaatgaagcgtaagattgccaaaggactgatggcggcgtccgttctgatctgctgtctgtttttggtgaaagaagtgtttgccgggcgtttttttccgctgtacgaaacagaagcggagtcggcaagcataccgccgcgtgccgtcaacagcctgtccgtttcatcggaacagacggatgtgaaaatcatcgcggaagcgcggaatgatatcgcggcaaacatgacgggaccggcggggaaaatgtttgtccaaaacaggggaaagaccctcaatctcaaagcgaaggagaaagggttccaatttctgaatctctttcagcgtcctctgctgattgtccgcattccgtatgattatcatcgggacatcaccgtccatacgtcaaacggcagcattgccgtcgacggaaacaaggggctgtctcttgcgcacctcagcgtccgttctgtaagcgggaacatgtcgctgaagcacgtgaagacggatgtgtttgaagcgaaggggctgtcgggcaatctcacagcagcaggccttgcggcaaaaacgggggctgtccgcttatcctcgggacatgtcgggcttcagcatgcggcgggcgcccttgacgtgcgggtcgcttccggcagtgtcgacgcctcgcttgagacggcggatgctcccgtatccgtcaggcttgcgagcggcagcgcagcgatcagcctgccgaaagacggaagttttacggtgaacgccgagacggcaagcggaagaatccggccgtcttattcctttgagaaaacgagtaaggaaggcggggcatttaccggcatgaaaggcagcggcgccaggccgattgatataaaagtgacgagcggcaatattgcactgcaatagtcaaggaaaggaggggcaagcagctgatggcaaaaaaacagattctcggacttatcatcgccttattaggcgtcagcatgtttttgcgtattatcggcatcggcgacttcttgttttggccgctcttttttctgatcacaggctatatttttaataaatattcccgcggctggctcggctccgtcctgtatatcttcgccgcttttttatttttgaggaacctgttcagcgccacctttaacctattcggctatgccttcgccgcctttctcatctacgcgggctacaggctcctgaaaggaaagcgcgtgcatgaacataaagagaagaaaatcaatcttgaaaaagaagagcagccaaagccttccgcccagccggaaagcagacagccggacctccgcagcttttttatcggcgagctgcggatgatgaaggacccgtttgagctgaatgatttaaatgtttccggattcatcggcgatgtgaaaattgatttgtcaaaagcgatgattcccgaaggagaaagcacgatgaccatcagcggtgtcatcggcaatgtcgatgtgtacgtcccgccggatatcgaagtgtccgtcagttcatcggcttttatcggcgatatgaacctgctcggctctaagaaaagcggcatgagcccgaatctgtataaagtatcgtctgagtacggcgactcgccgcggcggattaaaatttcaatttcgttattcatcggcgatgtggatgtgaagtatttatgaggaaaaaattactcgccaatattcagtggcgcgccatgcggatgaccgcgggactcagtctgctcctttgcgcggtgtttattacgctgatgctgctgtattacgggcttgacccgatgctgctgttttcttccggctggttcggtattccgtttgtggtcatcctgcttctggcgtctctttcggcgggattgatttccggttatgtatacggcggccgcctgaaaacaaggatggatacactgattgaagcggttttgaaatttgaaaacggcaattttgcttatcgggtgccgccgctcggcgatgatgaaatcggtctggcggcagatcagctcaacgaaatggccaagcgggtcgagctccaggtcacatcgctgcaaaagctctccaacgaacgggcggaatggcaggatcaaatgaaaaaatcggtcatcactgaagaacgccagcggctggcgcgcgatctgcacgatgccgtcagccagcagctctttgccatatctatgatgacatccgccgtcttagagcaggtgaaagatgcggatgacaaaatcgtcaaacggattcgtatggttgaacatatggcgggggaagcgcaaaacgagatgagagcgctgctattgcatttgcggcccgtcactttagaaggaaaaggcttaaaagaagggctgattgagctgttaaaagagttcaaagcgaagcagccgctggatattgagtgggacatcagcgatacgggtgtgtcaaaaggcgttgaagaccatctgttccgcatcgtgcaggaggcactttccaacgtcttcagacattcaaaggcgaccaaggtcaccgtcaggctcggcgcgaaacatcaaaaacttcagcttaaagtcattgataacggggcgggttttacgatggatcaagtgaaagcatcttcatacggcctgcattccatcaaggaaagagcgagtgaaatcggcggcatagcggaaattatctccgtaaagggaaaaggcacgcagatcgacgtgaaagtcccgatttatcagaaaacaaaaggagagaacgacagtgattcgagtgttactgattgatgatcatgaaatggtcaggatgggtctggccgcatttttagaagcacagccggacattgaagtcgccggtgaagcatcagacgggcagcagggcgtcgatctggccgcagagcttttgccggatgtgattttaatggaccttgtcatggacggcatggacggcatcgaagcgacaaaacagatatgctcgaaactcaatgacccgaaaatcatcgtgctgacgagctttattgatgacgacaaagtgtatccggtgatcgaagcgggagcgctcagctatttgctgaaaacgtccaaggcggcagaaatagccgaagccatcagagcggctgccaagggcgaaccgaagcttgaatcgaaggtggcgggaaaagtgctgtcaaggctgcgccattcagagaatcagcttccgcatgaaacactgacaaaaagagaactggaaatcctctgtctcgtcgcggaaggcaagacgaataaagagattggtgaagagctgttcattacgattaaaacggtgaaaacccacattacgaatatattgtcaaagcttgatgtcagtgaccgcacgcaggcagccgtatatgcccaccgcaaccatctcgtgacataagaaaaggagagcggcgccagcacactctcccgagggacggggtcattgggacattccctttgttccgaaatccctgatggcgactttgactttgtattcaatatccgattcactgaagtgatgatcccagtcagaggatatctttttccatttaccgggataatgaatccggacttgatcgcctaacccggtaatatccactttcaactcatgctgcatgtaatcaatgaatgccatgacatctgaatgaatgctgcgttttaccgcgtttttgatttcatttatataggactccttgaaagaatcttctttcgggttccaatcctcagacagacggccttcaacaaaccgggtaacgataaacttgaattttccatttttatattttgttttcacattatatttgctggaaaatacttcgaaggataaataatgattgtcatgctttgcaaacgtgacgcctccctttaccgtgcctgtgaacaggttcatattctggacttgtaaaggcgttaaattcgcataccagaatttatttttaataatggtagcgccccagatttccagtctgctgcccacttggcgcacttgaggaagggcaaaggtctcgcctttggcgattttctctgatatttcccccaatgtcacgggctccatcatccggatggtgaccgaattattctccgttaagtcatagatcgtatttgacgcaggttctccctggtcactgattttgaaaatatctttcgttttatccggcaccgtcatcacattgcagcttcttctcgtaccgttgtctctgataaattggttcatcaatgcgtcaagcggaatgtcatcctttaacagcgcttcggaaaacagcatgatgcgcaagtgctgagagaaagcggggtggttttttaacgatgccgtccttaaggcttggtgaacggtttccccggaagtggaagtcacctttgtcggattgcttgatgtcgactgctgggaacttgctttttgagggatcagaatctgctgcgtcacttccacgttttcttcctcaggtttatcgagcccgactccgataacgaggctcaagtcttctatattacggctgtcccagcatcccgtcaaaagcaatgagcaaagaaagattacgatgtatttcttcattgcgcttttttcaccttccttttcacagcgacgactccaaacatcagtaaaggcagcaaaaagaaaaccaagaagatatagccgagaatatcactgaacatcaacagtttgttgccgtcttttggcatcaatgatccgaagaatgtcgcaatccctacgaagataatcccttttttctgcttcagcccgaaaattttattcaggccagatgtcgcgaaatacccgtacgagacataggtggcgaaaaattggatgatccagacaacaagcaaaaaggactcgaacctttcaataaaaagccctttgatttcaaatgattgaaagagcgcgatcgtaggccagatcattgttttgacatcttgggtggttaaggcgccgacgacgagaacgtaggtaatgatgtataaaataatcgggatgccaaagcccatggccgacatgcggaatgtgtgctttttatttttgaggtactcggggagaaacagcataatctcaattcccaagaaggaaacagaaacgacggtcaaggaagccataacgggagaaaaaccctgcccgagcaccggccgcaggttgtccagatcaaatattttaaagctgaaagaaaacaccaccagcaaaataatgatcgtaatcgttaaatagaaaggaaagagcctgccgatatcgctcatgccgccgataattaaataaacggaacaggcgataaagataaacagcgtgaccggcacgggcgttctttccaataaaaagaacttgaccatttccgccatcgcccgggcttcgaagctggcgactcctataaaatagagacagatcataagattgacgatatttcccgcccatttgccgagtccttcattcatataatcaaataatgatccgtactgatgctttttcataatgagcgtattgagataaatcaaaaagataaagatgacgccttccagacataacgcgatccagccgtccggcgaatttgcccttgctgacagcgcacgcggcatggtgaggagtcccgcgccgagcatcgtgtttgaaatcaatgctgtcccttgatagcttgtaagcttattgtgagttgttttctggctcatttatgtttttcgcctcttttggttgatttttaatagggagacggagaatagagtcgtttgcgttttttaagctgaaaaatccattcggcgagaaatacggagaaccgaagcttcgctgtctcgataaatgagtgtagatcgccagcataaataaaatcatgccgtacagcccgaaagctgccgcggtaaacatcgaaatgaaacggagcacacggaacgacagacccatcccgtactgcggcactgtaaatgaagcgagcgcgacaatgctgaccacgatgaccatgatggagctgacaatattcgcttcaacggccgcctggccgatgacgactccgcccaccaatccgatcgtctggccgagcgggctgggaagcctcaagcccgcttctctcagcagctctatcgtaatttccattaccatcgcttcaatgataggcgggaagggaacgttttctctgttcgccgcgatggtgactgcgagcgtcgtcggcagcagcccttggtgaaacgaaacgagggcgatataaatggacgaaaaaaacagcgtgataaaaatagacgtaaaccgcagcgcccggatgagcgaggcggaaatccaccgttcataataatcatcgggcgactgcattaaaattcctaaagaagccgggaccaccagcgcaaacggcgagttgtcgacaaggatggcgacgcggccgttgaacaaggcggaagagactttatcaggccgttccgtattttgtatttgcggaaagggcgaatacttattatcctcaataagctcctcaagcgttccggaatcctggatgtcgtccatcttcacttcgctgaggcgctttacaacatcgctgacgacagacgggtccgctttatcatctatgtacatgaccgtggcgtattttaacttattttctccgatcggaacctttttcgttttcagcttcggatggttcgtgcgctgcctgatcatggcgacgtttgtatcagaatcttctatgaaggcggttttcggacctcttacgaccttttcggatgtgggttcattcacgcttcttttttctctttttcccgtggacaaaatgtatacgctgtcaagtccgttaataaacacggcgcattttccccgcagaatggagatgacggcttccttcgacgtaaagacgggacgggcgtcgatcttatcaagacgtttcgccaccgtatccagcgtcagagtgtcttcctcccgaagcagcgtttcaatcgcttcttttattttgtcttcgtcgttcatttcactcagatacatataataaaaaacaagcccgttcggaagcatctttttattttgaaccaggtcatcattctgctctacgtggggaagcaccagtgccagattaacgtgtatgtattccttgaattccgattgcgccatcgacagtcacccgccttccaatccttaattgaggttatcttttcctgttaaaaaaatgatatactatgataaagtatttaatggtacaagtttttttatgaaagcggaggagagatgtggcacaagtcagactggcaggaaatgccgaagaaattgaacagctcatcaaatcatttgaagcgcattacgaagtggcttacacgtcgaaagaataccgtaaaacaaatccgaagtataaatactctaaggattcgcgcgtctatcttgagctgaaattaaaaacggccaaggccgaaaaataaaaagggtttcatctgttactggcgaataatactcagggtgaagcaactgttatggagggatacataaatggactacagaattgaaaaagacaccatgggagaagttaaagttccggcagataaattttggggcgctcagacacagcgcagcaaagagaacttcaaaatcggttcagaaaaaatgcctcagcgtgttgtgaaggcgtttgcaatattgaaaagaagcacagcgatcgcgaacgaacgcctcggcaacttagagtctgaaaaagcacaggcgattgccgctgtatgtgacgatgttttaaacggcaaatacgacgataactttccgctcgttgtctggcagacgggaagcggcacgcaaagcaacatgaacatgaatgaagtggtggccaaccgcgcgactgctttattgaaagaaaaaaattccgagctgaagattcatccgaatgatgacgttaaccgcagccaaagttcaaacgatacattcccgacggcgatgcacgttgcggcggttcttgccgtatatgagcagctcgttccggcgcttgatcagctgcgcgcgacgcttgatgaaaaagcgaaagcttatcaggatattgtgaaaatcggacggacgcatttgcaggacgccactccgctgacgctcggacaggaaatcagcggctgggtatacatgcttgaccgttcgaaagaaatgattcttgagtcaacggaaaaaatccgcgcgcttgccatcggaggcacggcagtcggcacgggaatcaacgcccatccgcagttcggtgaattcgtcgcggaagaaatcacaaaagtaacggggcagacattcaagagttcgcctaacaaattccatgcactcacaagccatgatgaaatcactcacgttcacggcgcgttaaaagcattggctgccgacctgatgaagattgccaacgatgtcagatggctggctagcggcccgcgctgcggaatcggcgaaatcgtcattcctgaaaatgagccgggaagctctatcatgcctggcaaagtcaacccgacgcaaagtgaggcgctgacaatgatcgccgcgcaagtgatgggaaatgacgcgacaatcggatttgcggccagccaaggaaacttcgagctgaatgtcttcaaaccggttattatttataacttcctgcagaccgtgcagctgctcagtgacggaatgaattccttccatgacaaatgcgctgtcggtattgagccgaaccaagagacgattcaggaaaatctctctaactcattaatgcttgttacggcgcttaacccgcatatcggttatgaaaacgccgcgaaaatcgccaagcttgcccacaaagaaggcctgacgctgaaagaagcggcattacagctgaaccttctgacagaagaacaatttaatgaaatggtgcgtccggaagatatggtgcacccgaaagcataaaatgaaagaacggctgcagtcattgcggccgttcttctaaataaactgctgtttcagtaaaaatctgagctgttctgcatcttcagccagcaggtcggattccttcaaattcaaaatcattcctttgatgattgccggtttcggcgactttttcttcatttccgcttccagaatatccaagctctcggtgaattcagatgcttgcgccttgtccatcgtgccgatgcgcgtgcggagggtctgcaagatcgattgacttaaaggatcgggctgcccgttatgaaggggcccaaacagtgagcttgcctcatcaagagaaataaacgcttcatcatgtctgtccgccattccgtttacgatgtcatcaattctgtgaatcacggtatttgccagaagcgaaggctgtacggaccggccggtcagaatgagatattcaagatacatctgactgattccttctattaaaaaacaaagctcggctgtgtatggttcagctttttctccgtaaatagcaagaagactgtcgatatgaaactgcaggatcgaccggcggattctctttccgcactgcgccgcttcttcggtataaggaagtgaaccgtctttcatctgcacggtaataaaatcctgatgggcgagaatcgattcgtaaaacaccgcaagctgtttttggtaagcggctctcggactgtcaccctccgtttggatcgtcgtgattcgggtaaacgttttatcatagtagtaattcagcatggatagaagcagtgcttctttggaaggaaagtaaagataaaaagcgccttttgagattttgcattcatcggcgatttcctgaaccgatgtagatttgtacccttttcgggcaaacagttttattgctgcttcaatgatcagcttttctttttccttcaatggttccaccctttcggagccaggaggctggcttgtgcttctcatgtatgactatatggtcatattgatattctgtaaatttaacctgattgtaacttgtttttttgttttgttttatttatattataaagtgagctgaccgaatggtcaaagttctggcgaaagggtgaatctgaaaatgaaagaattagatgaaatgatcagccgcttgcgaaacagaggaattaaagtcgaaaaggtgaaatatccgaaaaagacaatttgtgaaaagaaatgggttcatcaatgccaaaaaccgctgaaaacaaactacagagattttaacggctattccttcacataaaaaaagactgcaatgaaacactacagtctactttggtatgataattcggtagattacacccgattggccattttcaattgaaattgatgctttatgcagggttaaaatccgttttacgatgctgagtcctatgccgaactcgcctttcttccctttattaaaaggctcgtacaagctggatagcatctcatcctcaatcggaggcccgtcattttcaaccgtcatgacaatctgctgctgattttggctgatccgaatgtgaatcgccgtctctgcatagcggatttgattttcgagaatgttttcaagaagtttgctccattgttccggatcaccgggcatcattaatgcatcttctgtttcaacggtccacgataattccttccgggcccatttgagccgttcaatgacttcttccgtgaccttcacaatgtcaaatgtctcatggtgcacccgctgcttcattaaataatcaagcttcgttaaatataataaatccttaattttcttctcaagtttttctgcttcgccttcaatgacatcaattgtggtttccagatcccccttaggaaaaatcccgtcctttattgattgagtatagccccttatcaccatgacaggcgtttttaaatcatgagagatattttgcaggagcgttctttccgtttcgtctttttgcaccagcttgctccgcatatcttcaatggtatggcctaattttccgatttcgtcttttctgtcgacgatgaccggatcatcccaatcctgttttgaaatccgtttgacatgcttctctaaggaaacgagcggccgcgagagatatttggcaagccaaatcgccggaatccagcttaacaaaatcacgccggcaatgataaagagcagctgcttgaacagggtgaatgccagatcatcacgataagaatcaagggcgtaagacagcatcatcgcatcctggccgttaatggtgaggccttttttaatgacgaaaaacactttttccccgctgatgtccgcgctgtatcgtttcgtgacgctgtgctggcggcccgcgagcttgtacaccttatggataaaggaagaagaaaagtagttcaagtctttgtcactggccgattcctcccgctcaggcagaagaacgtgctgaacggatcggaaagtcgtcggagcggtcgcatcctcgctgtaatatccacgctcgatcgatccgggcagccggtactccgtcagtacatgctgttcattctcaatggtcgtatacgtttcatccgtgaaaaaattacgcagcgtatttgagaacagcacgagcagcaggatcgaaatggctaagaggatgcctgagatgaccacccatatttgaaaagcaagcggcttatttttcatgacgtcatcatcctgtagccgaatccgtaaatggtctcaacctttaacccgggcatttttttccgcagcctccgcacaagatcatcgaccacccggtcagtgccgaaataatcatggccccatattttcagcagaatatcttccctggaaaaggggtgtcctttatggtgaagaaataaaagcagcagatcaaattccttagacgtcaaattgaccaggctgccggtttcatcataaacctctcgggcatcttcgatcacattgtaggaagaaacggtgatgccggttttttttggagcaggctgttctttatacacgagctcgagcagtttctggactcgtataataagctctctcggcaaaaaaggcttggcgatataatcattgcttccaagctctaacccgaggactctgtcaatatcggcatcccgcgcggaaatgaaaatgaccggcacatcgggatctttttcttttatttcttttatcaatgtatagccgtccgtatccggaagcatgatgtcaagaatccacaagtggggagacggctgcatctgctttctggcatcttcgccttttgtgaaagatgtaatgttccagccttcattctctaaatattttgtgagcagttcattcaggttatcctcatcttcaactagataaatggtgtatgacaaggcatttcacatcctttcaacgtcattatactagttttaacacactcaagccgcattttcataatttcacatattcttttcatttttatcccacaatgtttgtttatgatgtgtataagggaagaaaggaagaaaaaaagcggggaagataacatgttcaaacacattttgttttggagctttgcttttctccttattattgggacaatagaatttgtacatgcgatgaatatgtaatcgatagaatgaaaacatgctgaaggagtgtgcgtgaatatgaatgatcatcgagatgacggcagaagccgcgatcagtcagatctttcacatacggaacaaaacagaaatgaacagcagcggatcagccatcaggagcccgagctgcttgaagagcccgtctcgaaagaagcggaaaacgagacggcggccggtacggaatttgaaaaaacggctgccgtgaaaaaagaaaaaaaacggagagctgcttggctgagcccggttttaggcggcattatcggcggcggcctcgtgcttggcattgtgccgaacctgccgggtgagcagcataagacagaagccgtttctgatacgaaacaagttcagtcttcgaattttacgtcaacgcctttgaaaaatacctcaagcgtagcggatatggtggaagatttggagcccgcgattgtcggagtgtccaactaccaagcttcgcaaagcagccagttcggacttgacggcggttcaagctctgaaacggaaagcggcacggggtcaggcgtcatcttcaaaaaagacggcgaaaaagcgtacatcatcacaaacaatcatgtcgtagaaggggcgaacaaactgtcggtcactctttacaatgggaaaaccgaaacggcaaagcttgtcggaaaggatgccatcagtgacttggctgtattggaaatcagctcgtccaatgtcaaaaaagcagccagcttcggggattcctccaagctccgcattgccgataaagtgattgccatcggcaacccgctcggccagcagttttccggcaccgtcacacaaggtgtcatcagcgggctgaacagaacggtagatgccgatacatcccaaggcacagtggaaatgaacgtgattcagacggatgcggcgattaaccccggaaacagcggcggcccgttaatcaactcaagcggccaggtcatcgggatcaacagcatgaaagtcagtgaaaacggcgtggagtcactcggctttgccattccaagcaatgatgtagaaccgatagtcgaccagctgcttgcaaaaggaaaagtcgagcgcccatttttaggtgtgcagatgattgacatgtcgcaagtgccggaaacctatcaggaaaacacgctcggactgttcggcgaccagctgtctaagggtgtttacgtaaaagaagtgcaatccggctcaccggctgcgaaagcgggcattaaatccaatgacgtcattgtacaattgaacggcaaagatgtcggcagcagcgccgatatcagacagatcctatataaccagctgaaaatcggcgataaaacgactgttcaagtgctcagaaacggaagcaaaaagacgctgaacgtcacattaacgaaacaaaccgaaagcgcaagctgaacgcataaaaaaagctgaaccttcaactgaggctcagcttttttcgtcattctcccaagtaggctgacagcatccacacatgcttgtccgcttcttcaactaatccgacaaacaggtcggcagttgacgggtcattttgttcctcggcgatgccgatgacaaattttgattcgcggctgatttgtttatagtcttgaaccagtgattccaccatttcagcagccgttttttcctggccttcatccgtaatggaagcttgttcaaggtaagtgtgtaaagtcgccgcaggctgtccgccgatggccagaagacgctctgcgatggcatccgccgtttccgccgcttcgttatacagttcttcaaatttttcatgaagcgtaaagaagtgagggccttttacgtaccaatggaagcggtgcagtttagagtaaaggataaaccagtttgataattgtgtgttcattgatttctcaacaagagtttcagtatttttcgcgttttgtgtattcatattcatcgtcctccctgtgatctgttaatttaattatatcacgtatcaaataaaaatcaatactaaattataattattataatttagtttaagtgaacagctttttctttataatcgattcccaggcggaccacggaaagagtgagcggaaagccaatgtcagcttaacgcccctgccgatcggataccgcagtttcttcagccgtttcctttgtgctaattgataaatcagctccgctacgtcatcaggatcgccgcttttggatgcgttggctttgaagtaagcttcgatttgctgataatagcggtaatagggcgaatctttgccgggtgccgtaagatgattggagagagacgtctcccaaatagatgttttataggagcccggttctattaaagcggcatcaattcctaaaggcagcagttcgaggcgcaggctctctgtaaacccttcaaccgcgaatttggaagagacatacggagatagagccgggaaactggtcagtccgctgatactgctgatattgaagattttcgccccgccatgttttcgcatataaggcagcacggtttttgtgacgtgaatcagaccgaatacattcgtttcatactgctgtctgtaatgttccatcagcacatcttcaataaatcccccgtacgcagtgccggcgttattgacgagcaggtcaatcgatccgaaaccgctgatggtgttcccgaagtcagacaccgactgctcatttgtcacatctaaagaaacgaccgtaacatgttcggatgcacccgcttgagcggcggcctctttcagtaattcagctttctccggctgtctggctgttgcgatgacgtgataagaccgggcgagcttcagcgctgtcagcagcccgaatccgctcgtcgccccggttacaatggcaatttttctgttcatcttataatcctccccgtttgttcttatctcatagtgtatatcatctcgcggaaagaaggagaaatcgttcggaaatatgtcagaattgttttataatggagtcagcttcggatagaaaggggtaaagaaaagatggcattagagggattgaaggaaacatgggatttaaactccatttttgagggcgggagccggtcggaagagtttcagcaatacatacaagagctcaaaaagcatctaagcgcttttcaacatgcggctgaagcgtttacagttccgacgcatgcggatgaaagccgggagctgatcaatctgattgataggtttgaacggtcagcgatcatgatcaggcaggcgggagcgttcgtcggctgtcttcaggctcagaacactcatgatcagaaagcgaatgaatggagggcgcggatcaatcagctgagcagtgattttaaatccgctctggtcacccttgacgatacacttgcccggattgacgagcgggtctgggaggagctgctgcaaaaaccggaacttcaggatctcacatatgttttaaatgaaagaagagaccgggtcaaagagaagctcagcgcttcagaagaaaggctgattgaaggcctggccgttgacggctatcacgcatggggcgacctgtataatgcggctgtcggcagaatgaagattccatttgaggataaagagctgtcggtcggccaagcggaaaatatgatggcgcacccggatcgccgcatcagacatcaagtgttcaaagagcttaatgaagcgtggaaaggagaagaggagcttttcggcagcacgctgaaccatctggccggcttccgcacggaaatctataaagcgcggggctggaaaagcgctttggaagagccgcttgcgatcaatcggatgaaaaaagaaacgctggatgtcatgtggcaggtcattaccgatcataaaaagccttttgccgaatacctgaatcgaaaggcatctcttttagggcttgagcggctgaactggtatgatgtggacgcaccgatcggcgaggctccgaaagaatacacatatgatgaagcggccaatctgatcgtcagccaattttcgacgtttggcaaaaagctgtccgcatttacggaaaaagcgttccgcgatcggtggatagaagcggaagaccgcagcggaaagcgggtcggcggtttctgcaccagctttcccgacagcggagaatcccggatttttatgacgttttccggaagcgcttcgaatgtatcgacgctggcgcatgagctcggtcacgcgttccatcaggaggccatgcttcaagtgcggcagctgaacagagcctacgccatgaatgtcgctgaaacagcctcgacctttgcggaaatgatcgtcgccgacgccgctttgaaacaagcggagacaaaggatgaaaagctgttcttgcttgaagataaaattcaaagaagcgtagccatgtttatgaatattcatgcgagatttttatttgaaacgcgtttttatgaagagcggaagcagggcgtcgttccggctgagaaactgaatgaactgatggaagcggcgcagaaagaagcgttttgcgattcattaggggaataccaccctcatttctgggcgtcaaaactgcattttcatattacgggagtgccgttttacaactttccgtatacgttcggttatttattttcgcttggaatatatgctagagctcttcgggaaaaagcggattttgaagaaaaatatatcgcgcttttgtgtgacacggcttcgatgactgttgaggatttggcgatgaagcaccttggagcggatctgacggaacggtcgttttgggaagacgcggtccgccttgccgtacaggatgtgcaggaatttttagagctgactgaatgataatcttgagatgaaccggccggagtgttaccgctccggttcttttttgtttaatgaatgacagccgcctcccttggaaatacctaaaaacgatcggaatggaatgggagtgaatcgcatgaaatggttcagaacggcgggcgttttatgtcttacgctgatgctgattgccggctgccgattgaatgaagaaaaacgggaagcggaacaagacagcacacctgtgtcatccgcgaagccggttccttacagcagcttttcccttcgcgtcagctacggagccggggagcataaccgctatgaaggtttgtatgagagaaaaggcggtcatgaaaaggcggacatccgggacaagctctcaggggttcacagagagggcgaggaagcgcttgatgaaatgaagatgatccttggagaacttgccgtaaacagccggatgcaggaaagcgaggtcgtccggcaggtgctctcggcttttaatttggacagccgctatgaccatttttatctgaaactgaaaaagaacgatggagaaatgacggaaataaaaaaataaccgccgtccgctgcttttttgcccaaaactaattgataatgatattcagagtcattaatttctgttacaatataatcatgatctcacgttgaatgtttaggcaatttgtttatatacatagtgttgggaaactcaaaaaaggagcggttagcggtatgagtgcaatttctacagagacgctgagcttagggtacggagagactgttatcattgacgaattggatgtggcgattccaaaaggcgaaatcactgtattgatcggaagcaacggctgcggaaaatcgacgcttttacgttcattggcccggctgatgaaaccgaggggcggttctgtgcttttagaaggaaaagccatcgctaagcttccgacgaaggaagtggcaagagagctcgctattttgccgcagagtccgtcagctcccgaaggcctgacggtgcatcagcttgtgaagcagggaagatacccttatcaaagctggctgaagcaatggtccaaagaggacgaagacgcagtcgcaaaagcgcttaaagcgacgaagcttgaggaaatggccgaccgtcctgtggattccttgtcaggcggacagcgccagcgcgcatggattgcgatgacactcgctcaggatacggatatcattctgcttgacgagccgacaacctatctcgacatgacgcatcaaattgaaattcttgatttgctgtttgaattaaatgaaaaagaaaaacgcacaatcgtcatggtgctgcacgacctcaatctggcatgccgttatgcccattatctggtcgccattaaggataaacagatttacgcagagggccgtcccgaagaagtcatcacttgcgagcttgtacagcaggtttttgcgatgaactgccaggtaacgcaagacccgctgttcggcacgccgctttgcattccgcacggacgcggcagatgtatcgtgcaggaagcggccctcaccgcccgattgtcataatcatgaaaaagggaagggaacggtatggaagagaaactgcagcagcagctggacggcctgcttgaaaaatacacggaactattgcttggcgaaacaaacccggatgtaaaggaagaagtcaggcagtggattttgtatacacatatcgcaaaaagcatgcctccgctcgtcaaacattggaatcaatcctacccggacgccaaagagggcatcaaagctgcgatacagcatattaaacagctcaatgaagcacacagaaaaaaacaataaaaaagctttcggcatcaaagagagagaggtgccggaagctttttttgctgaaaaggaatcaataaaggcttcgttcaattcataggcgaagaactttaatgtaactaatgcacccgtttgtttacgtatatgtcttccgcttgctgaaccaagaaaaaaggaccgccgcagcaatccctttctctctttcctatatatcacatttcctttcggctacgtaataactcttcaaatgcttttatatttgtatcaaaattgggcactgtttgggattcctcggcacatttgacttgtgccacaaccaaatcatgaaaaggtgttgaaatgccagtaccttctgccattttgggaataactccattaatataatcaatttcagttttgcgttttttctcaagatcctggagcatacttgctcttagcagcctagatggttccatggctgacctaaatgtttggatacgttcaggaatatcattttcactttttaattccaaagattctaaatcaaggccgcccattttcgcaaatttgacaccattggcgtgtccaaccttaatcgtctcatctgcgatatggactgcactaacaatgccgatttcatggtcaagaatgtctccgtattctccgtttaatgctgccgataaaccactgaatgcattattgataagtaattttgaccacttcgttccaactaaattatcggaaatatgtgttccgccgataaggtctaaaaccgatttaatacgcaggattctttctgttgtttcaccatgtaattctccaatttgaaaagcgtactctttaaattgagtatactcagttgtaagtctggatacgcccggctcaataaacgtagcaccaaattcaacagaacctgcaataacacgttcatcaccaacgatcgaagcaactttctgttcaggtataccgttttgcaaggaacatactacactgtcatcctttaaaaaaggcagcaactctttaagaatggagtcattatataattgtttcgtcagaagtaatattaaatcatacttgcctgacttgtcttcaggggtaatggctttcacttttgcttgaaattccgttgtaccaactactttagcacctatttgatttagagtatctacatgttctttgtacgaatcaatcaattcgacatccattccgccagcagacagatatgctccaactatggttcctaaagaacctgctcctaaaactgcaattctcattgtaaacgctccttatttttcctctaagtagttataaaccggctgtgctgcatttaaggttaaatccgtaagaatatgagatgctgaaacgacttctaatacaggcaaatctgcaagaggtgccagagcatgttcaaataattgaagccgcgccggtccagtccaggcacctttaacttctatattcgttatttgcgttcgcaccaaatcacaaacccttaaatcaccattgtaatcagtagcaatcttaaccataaaattaggtcggcaaatttcccttttcgctttttccttgtccatttcgaaatgtttatatcccatagtcgcagttgccacacgaagactgccataatccaatgtgccaacaagagtatcagagtctatatacagcttaggggcacccaatttctttgggtatgcagtaagttcccgtccgcttgcaatagccgggaaattgtcaacatacatagaatgtacataatctccttcttcaccattaaagctgacagggatgacttgtcctgcctctgtataggcgccaagtccggaaacatcgggcatccacatcacttcgaatttcactaaaggttcagtaatttcaagaggttctggcactgccgcacgtaaagctttttcatccgttcggtaaataatattaagatattcccggttaacaaatttataggttggcacggggtaagcaggtgatgttaaaggtgtgtttaaatttttcacaatgttattcacatcaattttcatagtatgagacccctttctttttcttttttatgttttttcaatttaactatgctattatcttacattcgcatttacatttaatccaatacataataaggtatatatatatttattgaaataaatgaggggggtgcagacagatggaattgctgcagctaaaatactttcagacagttgcctatactgaacatatttctaaagcggcagaacaattaaagattgcccagccttctttaagtctcactataaaaagacttgagaatgaactgggaacaactttgtttgagagaaaaggcagaaatattaagctgagttcagcaggtaaaattcttttaaaacatgtaaacaggatttttactgagattgaaaatgcacaaacggaaattcaattggaggaacatcaaatttctgacaagataagaatatctatttccaatccaagattccttgcaggactgatgagtgaatatattaaccgctcccctcaatcaaaaattctccaagcgatcggagttaaaagcgagatcataacaagtttaaaaaaaggggacattgatttaggaataacaggtcatccgattcaggatgaagagatagagagttgtgtgctggtaaatgaagatattgttctggctttgccctcaaaccaccgatatacgggtaaaacagaaatttctttacgccttgtcgccgatgaaccatttattacccttgctaataatgaagagtatagcggttttacagcctcgctttgtgagaaagctggtttcaccccgaatattgcgtttgaggcagattctcatttactggtcgagattttaaagctggatcaaggtgtggcgttgcttcctatttcagtttgcagaacattggggctgaattttataaaagtgactgatcactctgcttcatatccagtcggcttatcttggatgagacataagctgttgtcttcttcggtaagaaattttcgtgactttattatgtcgtactataaagataactatgaaatgtttaaggtttattaaagggtttcatcattatttttttaaatttttaccccccatttccaatgaggcggaagactggtcattcccagatgatataaaaaaatcccgcggcatccgcgggatttttctttgttaaacggctttcgccttttcttcttgtttgcctgtctttttgtttgtcagtttaattgatttaacaaacagcgtgaggatcaatccggcagcgataaaggccaggcctgtgaaaaacacgctgtgaagcgaatccatcagtgacgttttcaaaaccggcacgatatgagaagaaaatgcggccggaatctgcttaatcgattcctggctgaacaaggattgaagcagcccttcaggattcttgtcaatcatacctttaaactgggcggcaaaggcacttgcctgtttcggcagtgagtctaagtaaggcaccagtctgtcggttaaaaggcttcctgatctggcattcatgacagcgccgagcaccgtaatgccgaacgttcccccgatcatccggaaaaattggcttgaagaggtcacaacacccagctcttcttttgaaaacgtttcttgcagagcgagtgtgagaagcggcatgacgagccccattcccagaccgatcacggccatatagcatgtagccgcgagcttgcttgtatccagctgtaaggtcgttaataagaagaagccgacggccatgatcagcatgccgatcatgatttgcggtttaataccgatcttataaaccaactggcctccgataatacttgtgataatcatagataccatcatcggcgtcataatcgtgccggacgcggtggcgctgactccgataattccctgcataaagaaaggaacaaacgtgacggcgccgaacatgccgatactcatgaaaaagccgatcagattcagtacggtaaacgttctgtttttaaacaggtacatcggcagaatcggttcttttgctttgatttcagcgaaaatgaatccgacaatcccggcaagcgcaagcgcaaagagaccgagaatctgccaagagccccatgcgtaatcctttcctccgaagctgagcgcgaggaggaggctgacgattccgacgatcattgtgaaaatgccggcgatgtcaaagttaatcggcccggtctgttttctgccttgaagtcctcttgcgataaagatgacggctaaaattccgacaggcaggttgatatagaaaacccatttccaatttaatgagtcaacaatccatcctccgatttgcgggccgatcacggaagcaagcccgtaaatcgccccgaaaagcccttggaacttggcacgctgtttccctgtgaacaaatccccgatgacgatcatagccatcggcatcatgacaccgccgccgattccctgaagtccgcggaaaataatcagttccgtcatgttgctggccattccgcacagtgcggaagctcccataaaaatcaataaacctgacacatagacgacgcggcgccccaataaatctgcaagtttccctgcaatcggaacgatcgtcgtcgaagttaaaagatatgctgtggtcagccacgtcatcatgcttaatcccccgaggtcacccacgattttaggaatcgccgttcctacgatggtgccgtcaagggctgagaaaaacatggcgatgattaagccggttattaataatgtgcgttttggatctttcttttcaatgctcatgtttcggcagctcctcttttctattcgttttctttttgatcagccgcgtatttctcggctgcttccgctactttacggatgatgttcacggactgaatcagttcatcgtcagtcagaacggacaggtttcgcgccagtatcgctttccgtccttccacaacttcttcgaattttgtttcaccttttttggtgaggctgatgtcgatgacgcgtctgtcctgctggttatgtttgcggacgataagtcctttttgttcgaggcggtcggccatcagcgtcactgcgctcggttttacctccatgcgttccgcaatttcggaaactttgcagctcccgtattttttcaggctggctaaaacaaataattgggcaggcgtcacctcgtgttttgccatgctttccaccatttcaggctgtatgttttgcagcagcgtctgaagagatttctggatatcagacacatattgatccgcgtttttcataactcctcctcatcttgttccttgagaaaataattaacattagttaaatataaataaggattaatgataagtcaatctttttgtgcaaaaataaaaaaaggattgatgcttggcaaaaacatcaaatccttcttcgttttactgctggtagggagactgctgctgaatggtctgccggaacttctgatacgattgctgaagcttttgggtatcggctgcttcaatggaataccagccattttgaaacatcacatcgtataatcttctttgcgctttttgtgactcatcgaaaatcgcctgaatatcttgataaagagactcgtggctgaactcgtgcagggctgtgcaatatgaagccgtgatgtatttttccgtcgtcagcagctcattcaccaagtctctgtcattcatttgcgccgtattgggcacgggcgtttgcggattcgtgattttttgattttgctgttccatgtattgtcctcctattgcatatagcctgttgttgtctgtccgccttgatcggggttcaagcggtccaatatgtgctgataatgtttctgatgcatccggccgatttgatcaagctcttgttttaacgtctgattctggcagtgttccgccataaaatgcgcttttttcatggcaagcagattccagttcagcatgtcctcaagatacaaatggtctttcgttgagatgacggcaggcggcaagtttccgttctgctcttggttgttcatataaacgcctccttcaattctgttctttttagctttctctgcgaccggaaattcatacacgaataaaagaaaaaggagggagttcatctttgctgcggagcatatgtttatttttgtcgaaaaataaaatgcttacaaaattcgcccaggcttacggaatccgcttcggcgcgggaaggttcgttgcaggggaaacactcgcggaagctgtgaaaacggtaaagcggctgaaccaaaaagggctgtcggcttcgattgattatctaggtgaatatgccggttcagagaaggatgcgaaaaggacggcggtagaatgtaaaaaagcaatcagggcgattgccgagaatcaactggattgtgagctgtctctgaaattaacatccatcggtctggatatttccgagaaactcgcggaacagcatgtcagagacatattgacggaggcaaaagaacgctgcgtgcctgtaacgattgatatggaggactattcaagatgcggccgtacgcttaagctgtataagcggtgcaagccggattttccgatgctcggcaccgtcattcaggcttatttgtaccgggcagctgaagacatcagcggtctgatgccatacaagccgcggctcaggcttgtaaaaggcgcttataaagaatcggcggccgttgcgttccctgataaaaaagcaaccgatcttcattttcagcagctgattaagctgcagcttttgagcggccatgaaacggcggtggcgacacatgatgatgacatcatttcttatacgaaaacactcatcagcgaacatcagattccccgggagcagtttgaattccaaatgctgtacggcatcagaacggagcgccagaaggagcttgctgaagaaggatacaggatgaaggtgtatgtcccgtatggaaccgattggtacgggtacctgatgagaagaattgccgagcgcccggcaaacgcggcatttgtgctgaaagggatctttaaaaaataacggctgctccaaaaagcagccgcagcatgttattccatgttttcttttttatattgctgattttggctcgtccgtttgccgccgccgtatttttgcttcggtcccgcatttcctttcatgctggccgcgctcactgcggcagaagacggatcttttctccctcgcaccattcccttcacctccgggtttaagtttcccgcccgcgccatggaacatgcggaagccgaaaaatttaaaaaaattccatatttgctattgaagtcatcctgaaaatcttttaagatgaaagaagaaaagggtttcattttttttgccgaaaaaatgaatgactattcattcaaagttcaagggggatgactcatgcacaagtttataaagaaagcagccgttctcggatcaggcgttatggggtccggaattgccgcgcacttggctaacatcggaattcccgtcctgctgcttgatattgtgccaaacgagctgacaaaggatgagatgaaaaaagggctgacattagaaagcccggaggtccgcagcagactgagccgatcggccatgcaaaagctgctgaagcaaaaaccggcgccgctgacttcggctgccaatctcgactatataacggcggggaatttggaagatgacgcagctcaattgaaggatgctgattggattattgaagtcgtcgtcgaaaatcttgacgtaaaaaaacagattttctcactcgttgatgaataccggaaaccgggaagcatcgtgtcgagcaatacgtccggtatctccgtcacaaaaatggcggaaggccgatctgccgattttaaagctcatttcttaggaacccatttctttaatccggcccgctacttaaagcttctggaaatcattccgattcaggaaacatatcctgacgtactggagtttatgacttcatttgcagaaaacacgcttgggaaaggtgtcgtcatcgcaaaagacacgcctaactttatcgccaaccgcatcggtacgtacggcctgctggtcacggtaagagaaatgctttcttccggctgccgcatcggcgaggtggacacggtgaccgggcctttgatcggcagaccgaaaagcgcgaccttcagaacccttgacgttgtggggcttgatacgttcgcccatgtggcaaaaaatgtgtatgataaagccgacggcgctgaaaaagacatgtttaagcttcctgaatttatgaatgacatgctgaaaaacaattggctgggcagcaaatcaggccaaggtttttacaaaaaagaaggtaaaacaatatatgaactcgatccgctgaccatgacatacggtgagcgttcgaaaatgaagacgcccgctttagaagccgccaaacaggcaaagggtgccaaaggtaaaatgaaagcgcttgtatattccgatgaccgcgccggacgcctgctttggaatatcacatcgcaaacacttttatactcagccaggcttttaggtgagatcgctgatgatattaaagcaattgatgacgccatgaaatggggcttcggatgggagctcggaccgtttgagatgtgggatgccatcggcgtcagaaaatcagcggagcggctcgaagaagaaggcgcagcactccccggctgggtgaaagaaatgcttgatcagggccatgaaacattttatatgaaggaaaacggaacaccattttactattcagacggccaatacagggctgtgaaagaaaatccgaaacggatcagcctgcaaacgttaaaagaaacaaaaggcgttatcactaaaaacagcggcgcaagtctgattgatctcggcgatgatgtcgcgctgctggaatttcatacgaaaagcaacgcgatcggcttagacattattcagatgattgacaatgcgcttgaggaaacggagcggaattataaaggtcttgtcatcggtaaccaaggcagacatttctgcgcgggggcaaaccttgcgatgattttaatggaagctcaggatgataacttcatggaagtcgattttgtcatccgccgttttcagcagacgatgctgaacatcaaatacagcgctaaacctgttgtcgcggcgccattcgggatgaccctcggcggcggcacggaagtctgtctcccggcggcacgcgttcaggcggcgagcgaatcgtatatgggtctcgttgaaaccggcgtcggccttattccgggcggcggaggaaacaaagagctgtacatgaattatttggacggcggaagtgaactgatggacgcggccatcaaaacctttgaaacaatcgcgcttgccaaagtgtccggttcggcacacgaagcccgtgatatgaagattttgtccgcggctgaccgtatcagcatgaatcaggatcacctgctgcacgatgcgaaacagctggctgcttccttatatgacagcggataccgcccgcctgcccgcaaaaaagtgaaagtcaccggagaaaccggctgtgcggcattactgctcggagcagaccaaatgagacggtcgggttatttatccgatcacgatatgaagattgcaaagaagctggcccatgtcattgccggcggaagagtcccgttcggcacggaggtttcagaagaatatttactcgagattgaaagagaagcctttttaagcctcgctggcgaggcgaaatctcaagcgagaatgcagcatatgctcgtcaaaggcaaacctttacggaactaggagggtgtttatgagagaagcagtcattgtggccggtgcgagaaccccggtcggtaaagcgaaaaaaggatcgcttgcagccgttcgtcctgatgatttaggtgcgctttgtgtaaaagaaacgctgaaacgggcaggcggctatgaaggaaatatcgatgacttaattatcggctgtgcaacacctgaagccgaacaaggattaaatatggcgcggaatatcggtgcgctggcggggcttcctcatacggtgccggccattacggtgaaccgctactgctcttccgggctccaatccatcgcttacggtgctgaaaaaatcatgatcggcgcgggagacaccgtcattgcgggcggtgcggaatccatgtcgcaagttccgatgatggggcatgtgacccgcccgaatatcgctttggctgagcatgcgcctgagtattacatgagcatggggcacacagcggagcaggtcgccgaaacgtacggcgtatccagagaagaccaggatgcatttgccgtccgcagccatcagaatgccgctaaagcccttaaagaaggcaaattcaatgacgaaatcgtgccggttgaagtatcgctgacagaagtcggtgatgaccataagccgcggaaaaaacaatttaccttttctcaagatgaaggcgttcgtcccggcacatcggctgacgtcttggcgaagctccgtccggctttttctaaaacgggaaccgtgacggccgggaactcttcacaaacaagtgacggcgcggcggctgtcatgctgatggatcgcgaaaaagcatcgtcgctcggattggcgccgcttgtcaaattccgttcctttgccgtaggcggcgttccgcctgaggtaatggggatcggtccgattgaagctattccgcgggcgctcaagcttgccggactcgaattacaggatatcgggctttttgaattgaatgaggcctttgcttcacaggccattcaagtcatcagatcacttgggatagatgaggaaaaggtgaacgtcaacggaggcgctatcgcgctcggacatccgctcggatgcacgggaacgaagctgaccttgtcactcattcatgaaatgaaacggagaaacgagcaattcggcgtggtgacgatgtgcatcggaggcggcatgggcgctgccggcgtatttgagctcatttaaaacaagggggaaacgaagcatgaaacaggaaacggtcaacgtcaaaaaaggcggcagctttctgattgaagagacgggatatgatcaaatattcactccggaggactttacagacgaacataaaatgatcggcaaaacgacagaagaatatgtcgtaaacgatgtgcttccttatatcgatgaaattgaaaaccatcagttcgagcattcggtcagactgctgaaaaaagccggagatctcggcctcctcggagcagacgtacctgaagagtacggcggaatcggcctggataaaatcagttcagccttcattacggaaaagttttcacgtgccggcagcttttcgctgtcttacggcgctcacgtcggtatcggctcattgccgatcgtgttcttcggaacggaagaacagaagaaaacctatttgccggacttggcttcaggacaaagaatcgcggcatacgccttaactgagcccggttcaggttcagatgccctcggcgcgaaaacgacggctgttttgaatgaagcgggcacacactatattcttaacggagaaaagcaatggattacaaactccgcctttgcagatgtctttgtcgtctacgctaaagtggacggagataaattttccgcatttatcgtagaaaagaactatccgggcgtatcaacgggaccggaagagaaaaaaatggggattaagggttcatcgacaagaacgctgattttagatcaggcggaagtcccgaaagaaaaccttctcggcgaaatcggaaaaggccatgtcatcgcctttaatattctgaatatcgggcgctacaagcttgccgtcggcacaatcggcgcttcaaaacgggtgattgagctgtctgccgcttatgcaaaccagcgccggcaatttaaaacgccgatctcaagcttcacgctcactcaggaaaagcttgcgacgatgtcagctcggctttacgcgatggagagctctgtatacagaacagtgggcttattcgaagataatatgagcagactgacggaagaggagcaaaaggacggacgcgaagtcgcgaagtcaatcgccgagtacgcgattgaatgctcgctcaacaaaatgtgcggttctgaaacgcttgattacattgccgatgaaggcgttcaaattcacggcggttacggatttatgcaggaatatgaagtggagcgtgcctatcgcgactcaagaatcaacagaatttttgaaggcacaaatgaaatcaaccgcctgatcgtaacgagcacgttcctgaaaaaagccgtaaaaggtcagctgccgctctttgaaaaagcaaaagcgctccaagaagaactcatgatgctgatgcctgaagagccgggctcagaacctctcgaacaggaaaaatacattgtcagacaggcgaaaaagatcgccctcttgacagcgggtctcgcggcgcagaaatacggcaaagagatcgaaggcgagcaggaaatcatggtgaacattgccgatattgtcagcgcgctgtacgctttggaatctgccgtcctcagaacggaaaaagcaattgcggcggacggtgccgaaaaagccgcgcagaagctgttatatacggaaatctttgcccaggaagcccttcagaacattgaagcgcacgctaaagaatcactgatcgccatggaggaaggagattccctccgcatgatgctttccgtgctgcgcaaactgacgcgcctgacaccgaaaaatctgattcagaaaaaacgtgaagcggctgccgctgtcttccgtgaagaaaaatatatcgtctgatcacatgctgaaagcgctccttcatcaggggcgctttttcacgaagcaacgttataggtttttacaagtgattgtgttaaaataacgacgatcatttacaaggggtgaagaagatgtcgttaaatttttactggtaccctaaatgcggaacgtgccgtaatgcgaaaaaatggctggaagaccgcggtaaggaaataaacgaaatacatatcgcggaggaaactccgtcgaaagaagaaattaaagacctctatgagaagagcggtcttgagctcaaaaagtttttcaacacgagcggaatgaaataccgcgagctgaacttaaaggaaaaactgtaccacatgtcagaggatgaacagcttgaactcctggcatcagacggtatgctcctgaaacgcccgattacgacagacggcgaaaaagtcactgtcggctttaaagaagaccaattcgaaaaatattggatgtaatgccaggttcaaagaattatggtatcttcttattataagaaaaaaatggagggatttagatgagcacaccgaaagatatgcgttattccaaagagcacgaatgggtcaaagttgaggacggaaaagcccgcatcgggattacacatttcgcgcaagccgaacttggcgacatcgtctttgtcgagcttccggaagtcggcgccgaaattaaagcggacgagccattcggcagcgtggaatccgtcaaaaccgtttccgaactgtacgcaccgattaacggaacggtgacggaagtgaacgaagaccttgatgacagtcctgaattcgtaaacgagtctccgtatgaaaaagcgtggatgatcgtcgtggaaccggctgatgctgaagaaatcgaaaacctcatgacttccgagcaatatgacgaaatgacacaggaagactgatcggatagcaaatgggccatttggacattctatctgtaacgggaggtgtctaaaatggcttttgataaacaaaaggtcgatgtgacggagaacgttacgggccgctttcaaaacggccggttttccctgtttcatgaaaatgaagccatcggcgagatgacaggcatggaccagtacgagctcaaacagggcttttcatttgaaaatcaaaaattttataaaacagccgatgtcataaacggcagcgatccgaaatatgtcgattgcgattatgagaatggctggtgttaacagttggcggtgaatttcactgccttctttttcaatctgacgctaaaacaatcggcaggtgacgcgcttatgtacaacggagatgaaaaggtcattatcgtagaaggaaaatctgataaaatcaaagtcagcgaagtgctcatcgaacctgcggaaatcgtctgtacaaacgggacgattggccaaaccgaactggaagatttggcggacagcctgtttgacagagacgtctatattttaacggacgcagatgactccggagaaaaattaagaaaacagctgaaacgggagcttcccgaagcgcgccatatttatatagacagaacatacaggcaagtcgagtcgtgcccgggccatcatctcgcatctgtgctgatcagagccggctttgatgctgacactgtatttttgaaaaagaacgacctgaggtggtaatcatgaaagaactacaagaaaatgaactcgaatcgattcaggatgacgtttatctcctgtatttgtacaccccgttttgcggcacatgccagctggcgtccaaaatgcttactgtcgtcgaagaaatgctgcccggcgccgccttctataaaaacaacgtgaattattcccccgcattcgccaaagcctatcagattgaaagcgttccgtgctttttgctgtttaaaggcggagagcttgttgagaaaggatacgccttccgctccgtttcctatttatatgagctgattaaacaaaaaacatcgcaaacgttcccgatgtgacaatatttacaggaaaatgtcgtgcggtttataaagggttctgtccgttaaaaagagaaagtgtatgtatggccattaaaacgggaggttatacgagtggagaaaatagaagtttcagagaatgacggacagcatctgtttttgaaaccgctattaaacgcctcaactctgctgattacattccaaggagaaacagaagccttaacggtctcaattaacggacagggagaaatgagaaaaacgtcggtttcaaaggaaaaatctaatttgaccttttacggaaaccagacggaaatcatccatctcctgcatggtgatgtctctttgcaaaagcttatccaaagcggaaaactcaaagtgaaaggatcattcagagctctgctgaagctggaggccatcctctggctgacaaacggattttttcaggcgatcagtaaacggccgtaactgccaatctactatgtgacaatagcttccaatatttattttattgactttttatcattcgccgtgctattctacagtaagaatttccggacgaaaatacgatatgttttctcttatcaagagaggtggagggaagtgccctatgaagcccggcaaccatcaacaatgttgaaatggtgccaattcactcgaagcggtctgctttgaaagatgagagaaaggcctttttcaataagcctttctgctcatttttgcagaaaggcttttcttttgcggagaaacccggaagatttcttagaatagtgtaaggcgggtgattgctttgatccatcttcaaaatgtttcaaaaatttacaaagcgaagcatggggatgtcaatgctgtccaagatgtcactcttgatatcaaaaagggcgaaatatttggaattataggatatagcggagctggtaaaagttccttaatccgtctcctgaacggccttgaaaagccgacgtcgggaaccgtggaagtcgcggggacggaattaaataaagtaagcagccgcggactgagaaaagcgcgccaggaaatcagcatgatcttccagcattttaaccttctgtggtcgcgcaccgtccgggagaacattatgttcccgctggaaatcgccggcgtgaaaaaaagcgaacgggtccgccgcgctgatgaattgattaaactggtcggattagaggggaaagaaaagtcttatccgtcgcagctgagcggcggtcaaaagcagcgtgtcggcatcgcccgggcgctcgccaataatccgaaagtccttctgtgcgatgaagcgacatcagcgcttgatccgcagacgaccgattcaattttggatcttttatccgatataaatgacagactcggtctgacgatcgtgctcattacccatgaaatgcacgtcatccgaaaaatctgcaacagagtcgccgtcatggaaaacgggaaagtcgttgaagaaggcgaagtactccaagttttcagaaacccgcgcgaaccgatgaccaagcgtttcgttcagcaggtgacagaaccggaggagacgaaagaaaccatccagcattttctgcaggaaacagcgacaggaaaaacgattcagctctcatttgtcgggcaggccgccgagcagcccctcattacggaaatgatccgaaactttgatgtggacgtcaatattctgcaggggaaaatttcacagacgaaggacggagcctacggttctttattcattcatattgacggtcaggaaaaagaagtagaaaacgtgatccggttcatcaaagacaaacaggtagaagcagaggtgatcacaaatgtttgaaaaatggttcccgaacgttgatacaaccgagctgtggacggccacatacgagaccctttatatgacggtcatcgcattagttttttcatttatcatcggagcgattctcggtcttctgctctttttaacgggcaagggaagcttatgggaaaataaaatcattaacaccgtgattgcggcggtcgttaatattttcaggtctattccgtttcttattttaattattctgcttctcggctttactaagattttggtcggatcgattttaggaccgaacgctgcattgccggcgctgattatcggatccgcgccgttttacgcccgtcttgcggagattgcgctccgggaagtcgataaaggagtcatcgaagctgcaagatcaatgggagcaaagacatcgacgattatcttcaaagtgctgattcctgaatcaatgcctgcgttaatttcaggcatcaccgttacggccatcgccctgatcggatctaccgccattgccggcgccatcggttcaggcggactcggaaaccttgcatacgtagaaggctaccagtccaataatacggatgtaacgtttgtagcgacagtatttatactcatcatcgtctttatcattcagattatcggtgatgtgattacaaatataatagacaaaagataagggaggatttacattgaaaaagattgtattaagtgcgctgctgcttgtgttcgcgggagttttggccgcctgcggatcaaacggctcaaataaaaaggaaatcgtcgtcgccgcgacaaaaacaccgcatgctgaaatcttaaaagaagcggaaccgctcttgaaggaaaaaggctacacattaaaagtaaaagtgctgaacgattacaaaatgtacaacaaagcgttagctgataatgaagtggatgcgaactacttccagcacgttccttaccttgaacaggaaatgaaagaaaataaagattacaaactcgtgaatgccggagccgttcaccttgagccattcggaatttacacgaaaaaatacaaatcactgaaagacctgcctaaaggcgcgaccatcatcatgactaacaatgtcgctgaacaaggccgtatgctggcgatgcttgaaaaagccggactgatcacacttgatccgaaggtaaaaacgattgaagccactacgaaaaacattacgaaaaacccgaaaaacctgacattcaaaaaaatcgcccctgaattaacggcgaaagcatataatgaagaagaaggcgatgcagtcttcattaacgtcaactatgcgattcaaaacaaactgaatccgttaaaagatgcgattcaagtggaatcaacgaaaaacaacccgtacgcaaacatcatcgccgtacgcaaaggtgacgaaaaatcagagaaaatcaaagcgcttatggaagtgcttcactctaagaaaatcaaagacttcattgagaaaaaatacgacggagccgtgcttcccgtatctgaataaaacgaaaaccccggatgaatcatccggggtttttttcgggtattaatcggagaactgtccataataaaaaggaaggttaacgattggagggaatggcagtggctcaataccaggaaaacggaaaaagcgtgcacgacgcactgaaacaatataaagaaggtttaggtatattcgagcaaaaaatgccgatgatggggcggaagtttaatgaatttactgaacagtgtttctcagcggattcattaactgaaaaagagaaacaattaatcgctctgggcatcagcatcagcgctcaagatgaattttgcatgatttatcatacgaagggctgccttgaccaaggggcgacagaagaaaacatccttgaggtcatcggcgtcgcagcggcattcgggggcggcgcggctctcagtcagggagtgaccctcgtacagcagtgcattcaggaattcggacatacgacgcattagaaagagcaatcgtgtgaataccgtttttcagataaagcgagcgccggattccggcacattcgaaaggattcaggggcacactccctttggccggagcagcggatcattgttacaatagaaacaaatagatgaagggattgattcattatctgcaccagccacgagagactggaccttgactatacgcctgaaatggaaaaagcgatgcagaagtcacacggcatcggctacgaggaatacggacggcgtctttcaaaaaggatggaagtcgaacggcagagggagcttgaatatcaaaaaagcaagttcctcgcagcgcagcttaatgagaaaatcggtcagtaaaaaagggtggatttccgccctttttctgtttcaaacagctttaattacgccttgatctttgataaactttaggaatgttccgggtaatataaaaagttgtatttacttttcatttgttataaaattagaatgagaataaattgagaataatgattatatattttggaggtatagatatggctgcttcaacattaacgatcaaggatcttcacgttgaaatcgaaggaaaagagatcttaaaaggtgtaaaccttgaaataaaaggcggcgaattccacgctgtcatggggccgaacggtaccggtaaatccacgctttcagcagcgattatgggacacccgaaatacgaagttacaaaaggcagcatcacgcttgacggcaaggatgtactggaaatggaagtggacgagcgcgctcaggcgggtcttttccttgcgatgcagtacccaagcgaaatcagcggtgtgacaaatgccgatttccttcgctctgcgattaacgcacgccgtgaagaaggcgatgaaatttctcttatgaaattcatccgcaaaatggacgaaaacatggagttccttgaaatggaccctgaaatggcgcagcgttacctgaacgaaggtttctcaggcggggagaaaaaacgcaacgaaatccttcagcttatgatgatcgagccgaaaatcgccattcttgacgagatcgattcaggtcttgatatcgatgcgcttaaagtcgtttctaaaggaatcaacagaatgcgcagcgaaaacttcggctgcttaatgatcactcactaccagcgccttctgaactacatcacgcctgatgtcgttcacgttatgatgcagggacgcgtagtgaaatccggcggcgcggagcttgcacagcgccttgaagcggaaggttatgactggattaaacaagaactgggcattgaagacgaaactgtaggccaagaagcgtaagcgttagggggataatcatgacattggaaacgaaactatccgtagatcaggaatatgtcaaaggcttttctgaaaagcatcaagaacctgcctggctgaaaaacctgcgcttacaggctcttgaaaaagctgaagatctgccgctgcctaagcctgataaaacaaaaatcacaaattggaactttacaaagttcaacaagcatacagtagaaaatgcgccgcttgcttctttagaagatttagctgatgaagcaaaagcgctgatcgatatcgaaaacgaagacaaaacgttatatgtgcagcgtgaccaaacgcccgctttcctttctctttctaaagaactgaaagacaaaggcgtcatctttacggacatcttaacggctgcccgtgagcacagcgacctcgttgagaagtatttcatgaaagacggcgttaaggtcgacgaacataaactgactgcgcttcatgcagcattaatgaacggcggggcattcctttatgttcctaaaaacgttcaggtggagacgcctgttcaggccgtttacgttcatgaaagcaatgacacggcattgttcaaccacgtgctgatcgtcgctgaagatcacagctccgtcacttacgttgagaactacatcagcacggtgaatccgaaagaagctgtattcaacattatcagtgaagtggtcacagctgataatgccagcgtgacgtacggcgccgttgacaacctgtcagcaggcgtcacaacatacgtcaaccgccgcggagccgcgcgcggacgcgacagcagaatcgagtgggcgctcggactgatgaacgacggcgacacgatttctgaaaacacgacaaacctctacggagacggcacatacggcgatacgaaaaccgtagttgtcggaagaggagaacagacggaaaactttacgacgcagatcatccacttcggtaaggcttctgaaggctatatcctgaagcacggagtcatgaaagatgccgcatcttccatctttaacggaatcggcaaaatcgagcacggcgcgtctaaagcaaacgctgaacaggaatcccgcgttttgatgctgagtgaaaaagcacgcggagatgcaaaccctattcttttaattgatgaagacgatgtaactgcaggacatgcggcatctgtcggccgtgtggacccgatccagctttactacttaatgagccgcggaattccgaaagaagaagcggagcgcttagtcatttacggattccttgctccggtggtaaaagagcttccgattgaaggagttaagaaacagctcgtctccgtcatcgaaaggaaagtaaaataatgaatatcaccgatattcgtgaacagttcccgatccttcatcagcaagtgaacggacatgacctcgtgtaccttgacagcgcggcgacttcccagaagccgcgtgctgtcattgaagcagtggatcagtattacagcaaatacaattccaatgtccacagaggcgttcatactcttggcacgagagcgacagacggctatgaaggtgcgcgtgaaaaagtccgtaagtttatcaatgcgaagtcaatggctgaggtcattttcacaaaaggcacgacaacttcactgaatatggtggcgctgagctatgcccgcgccagcttaaaacccggtgatgaagtggtcatcacccaaatggagcatcatgcgaatatcattccgtggcagcaggcagtaaaagcaaccggcgcgactttaaaatatatcccgatgcaggaagacggcacgctttcgttagacgacgtccggcagactgtcacaagccatacgaagatcgtggcagtcgctcatgtgtcaaacgtgctcggcacgatcaacccgattaaagagatcgccaaaatcgctcatgacaatggcgcggtcatcgtggtggacggggcgcaaagcacaccgcacatgaaaatcgacgttcaggacttggattgcgacttcttcgcgctttcttcccataaaatgtgcggcccgacgggaatcggcgtgctgtacggcaagaaagaactgcttgagaatatggagccggccgaatttggcggcgagatgatcgactttgtagggctttatgaatcaacttggaaagagcttccgtggaaatttgaagcaggcacgccgattatcgcaggcgcgatcggattgggagccgcgattgattttcttgaagagatcggactcgacgagatttcccggcatgagcataagcttgcggcctatgcgcttgaccgtttcgggcagctagacggcgtgacggtatacggtccgaaagagcgggcgggacttgtgacatttaatcttgatgaggttcaccctcatgatgtcgcgactgtcctcgatgctgagggcattgcggtcagagccggccatcattgcgcccagccgctcatgaaatggctggatgtatctgctactgcgagagcgagtttttatctgtataatacagaggaagagatcgataagctcgcggaagccctccaaaagacaaaggagtactttacaaatgtcttttaatgcaaatttagatacattatacagacaagtgatcatggatcattacaaaaatccgcgcaacaaaggggttttggatgacagcatcgtcgtcgatatgaacaacccgacttgcggcgaccggatcagactgacaatgaagcttgacggcgataccgttcaggaagcgaagtttgaaggggaaggctgttctatctccatggcttcagcttccatgatgacgcaggcgattaaaggaaaagatattgataccgccctttccatgtctaagattttctcagacatgatgcaagggaaagagtatgacgactcgatagatctcggggatattgaagctcttcaaggcgtttcgaaattcccggcccggattaaatgtgccaccctttcatggaaagcacttgaaaaaggagtcgctggcgaaaaaggcggcaattaaaagattggagtgaaaatggatggctaaaaaaatgcctgaaattggtgaatacaagtacggttttcacgataaggacgtttccattttccgttcagagcgcggattgacaaaagaaatcgtagaagaaatttcacgcatgaaagaagagcctcaatggatgcttgatttccgcctgaaatctcttgagcatttctacaacatgccgatgccgcagtggggcggggatttaaactctttaaactttgacgaaattacgtattacgtaaagccgtctgagcgttcagagcgttcttgggatgaagtgcctgaggaaattaaacagacattcgacaaactcggtattcctgaagctgagcaaaaataccttgccggtgtttctgcacagtacgaatccgaagttgtttaccacaatatgaaagaagatcttgaagagcaaggcatcgtcttcaaagacacagacagcgcgctgaaagaaaatgaagacattttccgcgagcactgggcgaaagtcattccgccgactgataacaagtttgcggcgcttaactcagctgtttggtccggcggatctttcatctacgtgcctaaaggcgtgaaggttgaaacaccgcttcaagcttacttccgcatcaactccgaaaatatgggtcagttcgaacgtacgctgatcatcgttgacgaagaagcaagcgtgcattacgtagagggctgtacggctcctgtgtacacaacaaactcgcttcacagcgcagttgttgaaatcatcgtcaaaaaaggcggctactgccgttatacaacaattcaaaactgggcgaacaacgtttacaacctagtaacgaaacgtacggtttgcgaagaaaacgcgacgatggaatgggttgacggaaacatcggttctaaattgacgatgaaatatccggctgtcattctgaaaggtgaaggcgcgcgcggcatgacgctctctatcgctcttgcgggcaaaggacagcatcaggacgcgggtgcgaaaatgattcaccttgcaccgaatacgtcatccacaatcgtatcaaaatcgatttccaaacagggcggaaaagtaacataccgcggtatcgtccacttcggacggaaagcggacggcgcccgttcaaacatcgaatgtgatacgctcattatggataacaaatcaacttctgatacaatcccttacaatgaaatcctgaacgacaacatttcattggagcacgaagcgaaagtatcaaaagtttctgaagaacagcttttctacctgatgagccgcggtatttctgaagaagaagcaacagaaatgatcgtaatgggcttcatcgagccattcacaaaagaacttccgatggaatacgcagttgaaatgaaccgtttgattaagttcgaaatggaaggttctatcggttaatagtaaaaccccgccatatggcggggtttttttgtttattgaatagtgaaattaccgtattcgcttgaccggacatgaatcggcccgtttaaattgtagttcttctctttgacaatatcgcggaaaacgtcgacacgggcaaccgattctctccattcatcctgagtatcctcatctgacggattcatcagatcgtcatagcgcacatccaagaatttattgagccatttcttctcatcaatcccatctttcggtgacccgcccatttttttgttcgtgcgtttaatcagggcataaaaggagtctggatcatcgccgtcgccatgctgaatcaccgtatcgtacatcaccgcttttgccaaggccgttttcagtccggcattttctgaacgtttcatcgccggctgataatacaagctgtcatttaccttatcttgggcagcgcggaaggctttctcattgccaagtgagcgccaggcagaagcgaatcctttcagattgctgatgtcatcgctttcgtccttcgcaagacgccgcaattcaggcaaatactttttcaatttgttattcggcaccgctttcgtgtatacttcgactacttccagcgcatctccggtagccgtcgtaaagccggcccgcccgcaagtgtaacctcttccgtcatccaacgcttcaacatatccgtattggatttccgtctttccgttttcaaagatgctggtcagctgttccgcccggcgcttctgatccttattcagcccggccgcagaaaccgtaccgctcatcagggtaaaaaacatggtgaaaataagtgacgaaaccgccgtcttcttccaaaaacctgcttttttcttcaagctgattttcattgccatacccctttcatatgtaagttacgcactcagtatacatgagggggttgtttttttgttgaaaacacacgaatttgtcaatattttgaatcctaagccctatccggcgcttcataaaaagaacgcaccttcatcagacagacaatcccgttctcgcgtcattctcatctgtcacatagtcaacgcggtgaaacccgcattgtacagcctgctgataaagggcttcgagcatatccggatctttgcaatataacgttacatacgagcaatctgcaatgagaagcacaagctcacaggaactctccaaatattcctcatacgtattgatttccgttaccatcccgctcgggaaagctttcaattcagcaaaaatcatataataagggtttccttccagacgctgacggagttcttgaccctgaatgatgcgctgattttgcggaaacaggtctgtatcggtgtcttctttaaattcagtatacgcctctccatcaccgataaaccacgtataggaagagatggggaacggttgtaatatatctgccgcaaaccgcccgaattgatttgggatgttaaatgtaatgccgcgtttcatatggtcgtatctcctttcggcttttgctagaataatatggtataccatttggataaatattgaaaggggtgggtgttatgacaacacgatacggcattgatgcgccttatggagcgtttggatttatctttcttgcgctcctttatgccgctgccacgttatgcggtatgattcctccttactggggctggctgacgggcaccttgtttttattgctcggtctttggatgctcttgtattcaacggccattaagcttttacaccgccatcgcattcttgcgctttccggtttaaagacggacatgaaggtgcttgatattgggacgggacgggggctgttagccatcgccgcggctcaaaaaggcgctgacgtctcagcgattgacaaatggtcaggctgggatctgagcggaaacgggagagacgcatttgaaaagaacagacgggcagaaggagcgccggaaattgatttgtatgacggactcgcgcaagacatgccgtttcctgataaaacgtttgaccttgtcatttcgcattttgtcgtacacaacatttcaggcagaaaagagagggaacgggcgattgcagaaatggtgagggtgctgaagcctggcggcacattggccgtgtcagatataaaaaatacatcacaatacagagagattcttgaggaaaacggctttcagacaagaacgtattccttttattatacgtttccgttttcgaaactcatcattgctggcaggactccggtaggaaccgggcgctctatttgttaaaataaataagacaaaacagatagaaaaggtgttatacatggagtcttatttgattatcggggccggcattctcggtgcgtccgcggcttatcatctcgcaaaggccggggcggatgtaacggtcattgaccggaaacacccggggcaggcgactgacgccgcggcggggatcgtctgcccgtggctgtcacagcgccgcaatcaggcatggtatgcgatcgcaaaaggcggagcccgctattataaccaattgatacagcagcttgaagctgatggagaaacagaaaccggttatcaaaaggtaggtgctgtcagcctccatacggatgaaaaaaagctcagccaaatggaggaaagagcttataaaagaagagaggacgcccctgaaatcggtgacattacaagactgactccggaagaaacgaaggcgctgttccccgcgctgtcggaggaatacggggcggttcatgtcagcggcgcggcccgggtgaacgggagagcgcttcgtaaggcgctgttaaatgcggccgttaagcacggagcggctgtttacaatgaagaagcgtcaatattgacagaggacggtgccgtcatcggtgtgaaaaccgcagaacgcacgcttactgccgaccaggttctcgtaacggccggcgcttgggcgagagagctgcttgagccgctcggcatccgtttttcagtatcataccaaaaggcgcagatcgttcatttagagcttcagggagaggagacgggcggctggcccgtcgtcatgcccccaaacgatcaatacattctcgcctttgacagcggcagaatcatagcgggcgcgactcatgaaaacgataccggcatggatttgcgggtgacggccggcggtctccgcgagatttttgacaaagcattaaccgtggcgccggggctttcagacagtactatgatagagacaagagtcggtttcaggccgtttactcccggttttcttcccatcatcggaaaagtgccgaatatcagcggactcctcgttgccaacgggctgggcgcctcaggactgacgagcgggccgtatctcggggctgaactggcgaaactcgcgctcgggcagcagacggaaattgatttgagcctttatgatccggccggggcacttgaataaaaaatagcttttggcgcattcttatgataggatggagctttaatgaataagaggacgtgacccatttgataaaaataaaccttcctgctcctgatgtaaccattacggaacggcagcagtcaccgtcggagaatgaaccggcgattaaagcgatttacggtttcattgattttcaccaaattccgagagacaaaggcggcatctttatgttttataacattcatgatgagctgctgtttgtcgggaaagcccgtaaattaagacaaagaatcaaaaagcattttgaagacaatgtgtcgcctgttaaacatcacagggacgaagtgtataaaattgaagtatgtgtcgtaaatgatccgatggaaagggagatttacgaaacgtacgcgatcaatacccttcagtcgaaatacaacattgagaaggtattttataaataagaaaaaccggagcttaagggctccggttttctttatgtctacagtgccagccacatcacggcaatatgcacgatcagcagacagtaaacgacgaggaatagctggacgaccttttttctgaataacatgcagatcatcatgagcacgggaaaaatcagcacgccggccgttttattgattgatgtattcggacggttcgacacgtcatagtgaatggccatatcagcaggaagaaacggataaaacacaatcgacagaataaaggcgagaaccacagctccccacagcactttatcattcatcaaaaacatatgaacactcccttttttacatataatagtatattagtccgaaaaatctaatttatcaatattttacctgttgattggtgtataatcatgtcaatgaaatttccatacgctaggagggtttcaattgactgacaagaagcaaaccagcatgttttcattctttctttttatcatggccgcctggatcatcgttttgttttttaccatcatcgcggcattgccaagctccgccatccaattaaccaagcatcaatccaaaaccgtttccatgatttatccgcaaagctggggatttttcagtaaagatccgagagaagacagcttgaacatctatcttcttgatgccgatgaggagctcagatggccgaataattctctgaaaaatgtcatcggcttaaaccgctatggccggacgcaagggatagagctcggccttatgctggaaaagctgccttccaaagagaagtggaacgacttcacgactggccaagacattaaggataccacatttttgaaaatgaaaaatgagtctccctccccaaggctgaaagggaaaatgatcattacatatgaacgcattaccccatgggcatggagccagcataccgaaacgaaaagaaccatcaaaaaatacatcggagtggatgtcaattgatgcaggatgcaaaaaagcagctcaccttatggatgatgaagaatccgccttggacaaatgtgtacgggcttgccagaagcttaatcgcgctcggcacgctgctgacattgctgttcaatccggcgtctgtcttcttcaaaacgcaaaatcaaatgctcagcttttccgacacgttcagcctgtttctgctgtttcccgatttccgttacattgagatcgtcaaagccgtttgtatctgtatgttaatccttgtcgtcattggctggcggccccgcctcaccggtttttttcactggtggatttcgtacagcttccaaaactccgccgttacccttgacgggggagatcaagtggctgccgtttttacgctgctgctgctcccgctgacattaaccgatccgcggaaatggcactggtctccgtacgaggcgtcttttgagaaaagaccgcttgagccttattaccgctccttatgctgggcgacactgacaatcatcagaatacaggtcgcgatgctgtactttaactctgtcattgccaaactgatggaagaagagtggcagaacggaaccgccgtttattactatttgaacgatccgatgctgggtctgccggatgcgcttcacggtctgtttgactttatcctgcagtccaagcttgtcatcatcccgacgtggggcacgctcattgtgcaaaccattatgttctgcgctttgttcgctccgaaaacatattggcgtttgatattgtttatctccatttttatgcacgaaatctttgccgttatgctggggcttacctcgttttccattacggtggctggtattttggtcctgtttttggtgccggcagagaaaacagtagctttgaaccattacaatcccctttttatcagatacaattttctcaataaaaggaaaaggaggaaattatatggttaaaagcaagaagtccgcagctgccatgatgctggtgtttgttttaatggtcgcattagtcggcccgcatgccgcggcgaaaactgagccgtcggtctcttattcgggtgaagacattttttccggcatctttttcggacaaggtgaggtcgcaaagctccttcctgaagtatgggataccaaggctgtcaaaaagattgatcaggatgaattaaagcaagtgtccgatcaggtgatcgctgatattaaaaagtcatcgccggattattttaaagagttaaaagcggcggtctacagcggcgattatgaaaaagtgaacagcgtcattgatcaaggttcgcagattatggcgaaagtgctgaaagaagagtttgacaaaaagagcatggacaaaggaaaatcaacggccatcggccaatgcgcaacggctgtatgggtatttttaaacgcggcggccgccattgagacgatcgctcttgcggtagcggccatcattttgacagtagcaagcgttgacgaagattccgacttaggaaaagagcagctcatcgctaatgtcgttgaccgcattaacgcgcagcactgaggctgaagaaagaaaacgctaaggagacgaaccttagcgtttttttgattgaagaatctgttttaaatatgcttctgaatcaaagccgagttcctcgtcggcttcttttttcagttcaagctgaagtcgcacgtacgtgtcatatttcgggctgagcttttgaagaagattgctgaaaggcgatcccgccttcagcgcgggcagatcagaagctgattctccgaccttgatcaggctttctctgtattcttcatctgtctgcactcttttcacaagctgaatgatgatgtttttatgagtgtcccaagtggcggggtctctctccaaaatccgctcgataaattgatcatgctggactttatgctgctggagctgagccggagcttccttgccgaccagctgcatcatcgggtgtgcagccggaacttcttccatatcatccaatacattgataagctccgcccatatcgtttttttctcatctgtatcaatagaaaagtcgaggaacggttcaaacagcgaggcgataaattctccgaaatctcccgggaacagttttttcagctgaagtcccatatatttcggttcatctattttaacctcgccgatatcatgcagaattgaatcgacattttccgcatcttccacgcgcttgatcagcatttcagtcagtttccgttcctgctcaagctcttcaatctgccggctgagcttttgatgctgctggcgcagtatatcatgcagactgctgccctctaagaggaacgctttaatatcgcttacagacagtgccagcattcggagggcggcaatcattttcagcgtattcacgttctgagcggaatactcacggtatccgttatcagggtttttgctgacggtgattaaaccttcctgctcataatatttgatggcttttttcgtgagacccgtctgcctggcggcttcttttatattcattctgaatcactccctgcttttcattctaaacgtgtctctaagggtcaggtcaagagagggcgggaaataagacgggtttgttttatattttagaaatttcagaaaatatgattgacaacgcacctttgttgcgattaatataacgttatataatgttatataacattatataataaaatactgaggagtgaaggatttgagtcaaactgccgcacaagtgaatcacaaggttcaggctttcttggatgatctgaaaggaaaaacgattgatcacgtctttttcgtcgcttgcgggggttcttcagccattatgtatccgagcaagtacgtgtttgacagagaggcgaaagccatcagctctgatctctacagttcaaatgaatttattcagcgcaatccggttcagctcggagagaaaactctcgtgattttatgttctcagtcaggcaatacgccggaaacggtgaaagccgccggtttcgccagaaaaaaaggcgcgcttacaattgcgatgacctttgagcctgattcgccgttagcgaaagaagccgaatatgtcgcggtgtatgactggggtgagaacgcacaggcgataaatacgaattacggagttctgtatcaaatcgtgttcggcgctttacacgtgctggaaaaccatcccgcgtttgaacaggcgatcgacggactcaataagctccagaccgtatatgacaaagcgcttaaacaagaagcggatcacgcaaaggcattcgcgaaaacccacgaaaaagaagatatcatttacacgatggcaagcggtgcgaactacggcgtcgcttactcctacagcatctgcattctcatggaaatgcaatggattcattcccacgccattcatgccggagaatattttcacggaccgttcgaaatcattgatgaatccgttccatttattatcctgctcggcttagacgaaacaagaccccttgaagagcgggcgctttccttctcaaaaagatacggcaaaaaactgactgtgcttgatgcggcagcatatgatttttccggaattgacgattctgtaaaaggctatctggctcctctcgtattaaaccgggtgctcagaagctatgcggatgcgctggcggaagcaaggaaccatccgttaagcaagcggcgttacatgtggaaagtcgaatattaagaacgcgcattatatttcaccggactataatgatatataacgttatagtccggtgacaaaggaggaaaagcatctgaaaaagctcatctgcctgttcgttctgttagctgtatgtctgtcagccgccgcctgttcaagccaaagcagttcctctgacggaaaagtgaccctgaagttttttcacaggtggccgaaggagccggaaaaaagctattttgaagaagcggtcaaagaatttgaagccgctcatccggatattcatatccaaacggaagcggtcttaaacgattcttataaagacaaggtgaaagtcatgctcggaacaacgagcccccctgatattttcttttcatggagcgaccggtttgcttataaattcatcaaaggaaataaagccctcgatctgtcgtcttactatcagcaggataaagattggtcctcacagcttgtgcagtcacaaatcaaaccctttacgcatgacggaaaacagtacggtgttccgtggcaaatggacgctaaatcattcttttataataaggacatttttaatgcattacatttgaagcccccggcgacatgggatgaactgatcacagtctctgagaaattgaaagagaacggatatattccaatcagtttcggcacaaaagcgccttggaccatttctcattatatcgggacgctgaaccagcgtatggtggatgaaaaaacgcgggcgaaggattacagcccggaaaccggggagtttacggacgaaggctatgtcaaagcgcttgaaaagcttcaggaacttctgccgtactttacaaagcacgtgaactccgtcgatcacgaatacgtgcgccagcagtttacgagcggcaaagcggcgatgatttatgcggaaacggcagaaattaagctcgtcgaaccggtcaatctggggttgtttcctttcccgaaaatcagcggcgaaaagggatctccccatgcactgaccggatctccggaaggatttatgatttcctcaaaaacgaagcacccgaaagaagccatggaatttcttcagtttttaacctcgaaaaaaatgggagagaagctgataaaagacgtcggtaaatacagcgcggttcaaggaacggcgacagaaaacaattccgccccgatccagcgtgaagccgtgcaggatatcgtccgcgcagaaacaatggtgccgtggtttgatatggatgttgacgttgaaatcgccgatgtgtatgcggcaggcgttcagcagatgctcggcggcacaatgacaccgcgcgaggtgatgaattccgtgcagaaagcggcgcgtcaggtcaaagcgtcatctgaatagaacagatttctttggagaaaggagatgaggatttccttggtcagccgaaaccgtttcattccgtatctgtttctcgcgcccgcgctgatttttctgctgttcgtttacattccgattattgagaatgtgtttttcagtctgtttgaatggagctcatttcaacccgaaaagacgtttatcggtctgaaaaattatattgacctgtttcacgatcccgtgttttttacagcactccgcaacaatgtgctgtatgcggtcatatcgctgatttgccaggttggcggcggcttaattctggcggccgtgctggaagacaaattgttaagaaaatggtcgccttttttccgcacggtcttttttcttccggtcgtcatttccatgaccgtcattgcgctgttgtttgattttatttataacccggaaatcgggcttttgaatcagctgctggaagccgtcggacttgatgaactgacccgcgcgtggctgggcgatgaaaacaccgctatgctgtctgtcatttttgtgtctcaatggcagtctgtcggttacatcgccatgctgtacattgtctcgattcagagcattcccgctgaattatatgaatcggcgcagctggacggagccggaaaaatccagcagttttttcacattacggtgccgcagacgaaagaaatgtcgtttgttgccgtggtgatgacgctgaccggcgcatttaccgtatttaatgaaccgtatattctgaccggcggagggccgggcaatgcttcagaagtgctgagcacatttttgtataagagcgcttttacaaaggatatgatgggctacgcttctgcgatcgcgacggtggtgcttttgctgacgcttgctctgtcgcttattcagatgaaattctttaagaccggaaaggaggagtagccgatgcttcctgaaaagacggacttgcgtcatgcccgtcaggccgtcagaacaggcggaaaaccgagaaaatggtatgtcggggaaacgtctgtgtggctgtttctctttatctacctcattgccgttgcttatccgctgttatggatggcggtcagcgcctttaaaagctcggatgagatttttgagcacagctggtcgctgccctctgtctggcatcccgaaaacttcgtatccgcatggaaccaagggatttccgcttattttatgaacagcgtcattgtgaccgtgctgacttgtctcatcaccgtatttgtgagcgcctgggcggcatacgggctggcccgttttcaatttaaaggaaaagggtttgtgctgatcatttgtcttggcggcttgatgctgacgccgcaggtcagtcttgtgccgctgtactccattatccagtcattgggactgtacaatacgtattgggcattgattcttccgtacgccgcctaccgtattccgtttaccgtgattctgatccgttcctattttttgtcgatttccaaagagcttgaggaagctgcctatctggatggatgtacaagtttcagaatatttttcagaatattcttacctatgagcgtgccgattctggtgacatcaggcattttgacggcttaccatacatggaatgagtttatgtttgcgattatttttatcgatgatgaaaatttacggacgattccggccgggctgatgcagttcagagatgcgctgcagacggattggggcgtgttgctggccgggctgacgatttctgctgctccgatcatcgcgctgtttttattgatgcagagatattttatccgcggcattgcagcgggaagcgtgaaaggataaggaggatgaaaagatgaaactgatagcggccggagataatgtagtagattattatcaggatcaggagacgttttacccgggcggaaatgcgttaaatgtagccgtgcttgcccggcgcttaggccacgaaacttcttatatcgggattctcggcagtgatgaagcggcggatcacgtattgaatgtgctgaaactggaaaaggtgaatgccgatatgatccgccgggcatacggagaaaacgggatggcggtcgtcacgcttgatgaaagaggggacagaatatttgccggatcaaataaaggcggcgtgcaatcgcgtctgacactcgcttttcaggagaatgacatctcatttatcgccgggcatgatctgctgcatacgagcgtatacagcaggatagaacgtgatcttccgatgctgagcggccatgtgccgatttcctttgacttctctgtaaaacgtgacgaagcctatttagaagcggtctgcccctacgtgacgtatgcgtttttttccgggagtgatttgagtgaaagtgaatgtgtgcggcttgccgaaaaagcccgcggtttcggagcgaaaatcgtctgtctgacaaggggagaatatggcgcggtgttatcggatggggaacgcgtctatcatcagccggtggtaagagctgatataatagatacattgggcgcgggtgattcttttatcgcagggtttcttaccgatttcttcgagcatcaggatattcggcgagcgcttactgcggccgccgggacggctgccaaaacatgcggagggttcggagcgttcggttacgggcatccctacaggccgggcggcgggaaaagcagtgaaaaaacgagaatacgataagcattgtctcgttttttatacttgttacacatagggactgttaatggtaaacgtgacgcggtctgtatgcattacaaacagcgagctgtatatcggctggtcttttgacataaaagcggttttgtcaatttcaaaaagcgcatccccgatatcacaagccagatagcggctttcttcctgcttggcgtatacgacatttaacagcttcgtattatgggtgggcaccacctgatagtgctgtttcaaaatgtcatgcatcgacacgccgcctttaatatgcttgccgatgtcgggaaataaactgagcggatagtgggcgatttcgaatgagagcggctggtcgtcgtgaaataaaatgcgttttaattcaagaacgggactttcggaagcgacgcgaagtttttgggcgatggatttaggcgcttcaatgatttcatgggaaaggatctggtgtttcggttttttccccgttgattccataaattcagagtagccgttgaccgcgatgagctcccgcttcagtttagggcttttaacgaacgttccctttccctgctgccggacgagccagccttcttccacaagatccaggatggccttcctgaccgttatgcggctgacgttgtacgtttcgcacagctcattttcagtcggcagttttacggacggcgaataaacgcccttcttgatatcgtccgcgataatttgtttcagctgaatatataaaggtttcgagctcccgttatttaacaatgggacggacctcctttgtcaagtagtagtactattatatgtattatgacgttataatacaaatttgctttttatttatgaatctgtcagaaaccccgaacatttttaacataacagaaagatgtggcggtttccagtattggaggaggtttcgaatggcatcattaacatttgaccatatcaaaaaaacatacggcgcccaatcggcggcagtgaaggattttcacttagatgtaaaagatgaggagctgctggtgcttgtcggtccctccggctgcggcaaatctacgacactcagaatgattgccggactggagagcatttctgaggggaagctttatatcgatggagacgcggtaaacgatctgcccccgaaggatcgtgatatcgcgatggtttttcagaattacgcgctgtatccccacatgacggtgtttgacaatatggcgttcggtttgaagctcagaaagctgccgaaaaaagaaattgcagagcgagtccggacggccgctgatattttggaaatcgggcatctgctcaagcggaaaccgaaggctctttcaggcggacagcggcagcgggttgcgctcggccggtcgatcgtgcgggagccgaaagtgtttctgatggacgagccgctttccaacttagatgcgaaattgcgagtgatgatgcgcgcggaaatcagcaagctccatcagcgtttgaaagcgaccatcgtttatgtgacgcatgatcagacggaagcgatgacaatgggcgaccggattgtcgtgatgaatgaaggagatattcagcaggccgcaagcccccatgagatttatcattatccggcgaatatgtttgtggcgggttttatcggttctccgagtatgaattttataaaaggcgtcattgaagaaagtcacgggcaatggtattttgccggttcgtccgttcgtctgcccattccgaaagaaaaagcggccgttcttgtgcagaaaggatacagcggtaaggagatgattgcggggctgcgtccggagcatgtgacgcttgccggacaatcagagcacccgcctgaagcggtgtgccgcgctgtggcggaagtatgtgaaaacttaggcgcggagatgtacgttcatgcggtgagcggagatgaccgcatgacgatccgtcttgacggcgcttcacaggtgaaacccggcgatgccattctgcttgcggtcaatatgaaccgggccgtcttttttgatgccgacactgaaaacgccgtatattgaaaaagggagcctgatgatcagggctcccttatcacttcttatgatacgattaccagatttcgtccgcccattccggatggtcgataaacggattgcggttatgctgatagtcttcgtaaatgatttcgttccgccgtttttccttactgtcgacggggtcttgttgattccatttgagcaaaacggacagttttcccatgtaaggagctgagccgtttccggttttatcattcagctcaaggtcgggatacccgtcttctccttcataacgcaccgccatgtaaaacagcatgcgggcgacgtctcctttaacttcatcgcgcggctcccaggaatcaccgtcgtaataattgcccggcgctttcgggtattctgagccgccgttatcaaaatccatatttcctctggcactgttcacctggacgtctgcagggcgcagatgatgaatgtccgtcccggggccggcagctgttccgaagtttccgtgtgactttgcccacacgtgttcgcggttccagtccccgacgctgccgccgtttttacttttggcccgtgattcctgggtgtagagcaagatgacattgttcgggtttgccggatcttcgtcagtttccttcaatgcattccatacttggctgtaagacagctttgtatgtccgctgatgatgcggtgcagggcgctctttaaggctgttccgctttttccggaagcttctttgtaatatgtgtccgtatccgcagacggagtgatgacagctgaggcagtttgcggaaaaagagtagtgccgccggcagttgaaaccgccatccggctgtacagattcgtgtcagccggcgcgcccgcagaggctgacggcgcggcccatccaaaaatgaaaaacaggcagacaatcggcagaaaccaaagtttttttgtcatgacttgccctcctttacctctattatccaaaaaataaatctaatattctatcttttttgaaaaatagttccttcggcttattggtcaaagtatccggaaaatcattgattttttagaagatatgataatgaactcgttatgcgctccttctataatgaagatcatcttgtcagtttttcagtttaaaaggagggcgtgtatggaacatcagcagctttcggcggcgaatatcgggatttccgatgacatacaatggctgtctcaattcggcgcttccgcttccggcggagtgacgaggcttttatatacgaaagaatggatggacgcccagtttgccgtcaaaaagaaaatggaggcgttcgggctggaaacggcatttgacgatgtcggtaacgtgttcggccggctgaacggcacagaatcgcctgatgaggtgattctgaccgggtcgcatattgacaccgttattgaaggcggcaaatatgacggtgcgttcggcgtgctggcgggcatgctggcgatccggcacttgcatgagacgtgcgggcgtccgaaaaaaacgctggaggctgtgtcgctctgtgaagaggaaggaagccgttttcccatcacctattggggctcaggcaatatcaccggtgctttctcgctttcagatgcggaaacgccgaaagacgcgtccggcatttctctgagagaagccatgcggcagaacggcttcggtgcaggccgttatccagcgccgctgcgcactgatattagtgcctttctggaaattcatattgaacaggggcaaacgcttgaacgatcaggaaaggatatcgggattgtcaccgagattgccggacagagacgctataccgttacgcttgacggtgaatgcaaccatgccggcaccacttcaatgaaatggcggaaagacccgctcgcggcgggaagcagcatcatccacgaactcatgctttcagcggaaagacagccggaagagctccgtctgacgtgcgggaaaatgacggttgaaccgaatatggcgaatgtcattccgggccgtatccagttttccgttgatattcgccaccggcaggaagacgtgctggcagccttccatcagaaactggtatcgattgttgaatacatcagccgcagcaaaggagtcagaccctttattgatgaatatatgaggatagagccggttcaaatggatcagacactgacacgaaccgcagcagaggctgcaaaagagcagggggcggacccggagaagatcgtaagcggagcgggacatgacgcccagatgctcggcagaacctttccggcctgcatgctgttcgtaccgagccgtggcgggatcagccactcgccgcttgaattcacacccgcacatcagcttgaaaccggcgtccttacgctggcgaatgtattacataaacttgcctattaacgtaaagggggaatcggcgtgccgaccagaaaagaattgtgcattccgcaaagaacgattatgacaccgggaccgacagaagctgaaccgagagtgctgagggcgatgggagctccgatcatcggccagtttgacccggtatttaccggcatcatgaacgaaacgatgcaaatgctccgtgaattgtttcaaacggaaaaccgctgggcctatccgattgacggcacatcaagagcggggattgaggctgttctcgcaagtgtgatagaaccgggagacagcgtgctcattccgatatacggacgcttcggatacctgctgactgaaatcgccgagcgatacggagcggacgttcatacgatcgagtgtgaatggggaacggtcttccggcctgaagaggttatcagcgagatgaaaaagatttccccgaaaatcgtcgctatggtgcacggagaaacatcaacggggcggattcacccgctgaaagaaatcggggaagcgtgccgcgcccaagacgcactctttatcgtggatgccgtggccacgatcggaggctgcgccgtaaaaacggatgagtggaagattgacgcagtcatcgggggaacgcaaaaatgtctgtcggtcccttccggaatggcgccgattacttataatgacaggacggccgctgtcattgccgcgcgtaaaaaggtagaacggggcattgcgacggcggctgacggcaacatgctgtccggtcatcgcccgattacgagcaactattttgatctgagccagctcgaagattattggagtgaaagaaggctgaatcaccatacagaagcgacagcaatgctttatgcgctgcgggagggtgtgcgccttgtcctggaagaaggacttgaagaacggttccgcagacatcggcgtcacgaaaaagcgcttacggcgggacttgcagcgatgggccttgatttattcggcgatccggaggcgaagctgcctgtcgtcacatgtgtgcagattccgccggaagcagacggcgaatcgatcagaaggatgcttttgtctcaattcggaattgaaatcgccagctcgttcggtccgctgcaggggaaaatttggcgaatcggaacgatgggctacagctgcagaaaggaaaatgtgctgattgtgctggccggacttgaagcggttctgatcagacacggagttgccgttaaagccggggaagcgctgcaggcggcccttaacatatatgatctgccggctgaaaccggtgtgctgtcatgagacttgaaaacgagattgaaatcatctggacttttttcccttttgcccgttatactgaatggtataaaaaatgacaaatatggaatgatcatctgtttgtctggggagaaggtaagaaatcatggcgtacataggccgattgtcaattttaatgctgaatatgtttattgcgatgcttggaatcggattgattattccgattatgcccacctatattaccgaattcggcgcgacgggcagcacgatgggtctgcttgttgcggcggcggggcttacacagcttttatttgcgcctattgccggggaaataaccgacaaatacggacggcggaaactgattattttcggcatcgccgcctttgccgtgtcacaattgatcttcgcctttgccggaagcctgtggcaattgttcgcatcccgccttttgggcggaatgggcgcggcgtttttaatgccgtcaatgttcgcttacatagcggatattacgaccgaagaagaacgcgggaaaggaatggggctgttcagcgcggcgatgacgctcggtgtcgtcatcgggcccggtgtcggaggctatttggttcattatggcatgtctgtgccgttcatcgtgtctgcaagtcttgcctgcttttcaagtgtgctttcatttttctttctgcccgaaacgctgggacgtgaaaagcagctggaagcccgggcaaaaacggaaaaacgtgagcatctgtttaagcaaatgtcacgcgcgctcaagtcgccgttcgcgtttatgctgattctggtttttgtgctgaacttcggaattatgaactttgaatctgttttcggcctttacgttgaccataaacacggatttaaagcgtctgatattgcctttattattacggctgcgggtctcatcggcgtgtttgtgcaggcggtcggcgtcagttatctcgtccgcaagttcggggaaaaacgcgtcattaacgtgacgttgatcggggcggctgcaggacttgtgtggtgccggtttgcgggttcatattgggccgtttttgccgcggcaatctttttcctgacgctgacatcgctgctccggccggccgttaatacgatgctgtcgaagctcgccggtgaccagcaggggtttgccggagggatgaacacctcattcatcagcttagcgaatattgccggaccgtcagtcgccggttttctctttgatgtaaatatggaatttccatatatgctgggagcggccattctcgccatcagttttctggccgcgcttggctggggcaaaaagacacagacccggccgtttacgcagcaaggataagaatcaaaagcctccggggatccggaggctttttgctatctcatagggaggaaaaaaatgaatagacttaaaaccctgtttattttcatttgcatactgatagtcacaacctcttgcggtctcatccaaactgggaatgaaaaagaggaaagaagcagcaataaaaagactgtattaaaggatattgacaatgcaaaatttattgtgggtttttctaacactttagataggggaagtgagattggggtttacagtgaagatggtgctaaaatggatagcttggaattgaaagatggtataaatttcacgatgtcttcatataacaaaaacgatacgttcttctcatcaaatagaagcaataatcacttgatgatagacaataaaaccggaaaaataaacaaaataaatgaaaagagtttgtcaaaaacaactgaggatgaaggtgctttctttataagaagttctgatggttatctcatccatgacattaacgttggatatacagacaaagggctggagagtgaactggtatattggaagggaaacagccgaaaaaacaagaaacaaataaagcttgacggagaacttggatcatcaatagccgtcaaaaataaaatttatgtcatttcaagtgatgaagaaagtatgtccgtcatttcaatcaacccagagacaaataagcaagagaacaaggcatccataccgaataaagggatatactttatggatgaaaaggatgcattccaagctctaaatgcaaatacatttatactgacggttaatgataacgtgaatgagaaagagaattctaagctcatattaatagacagagagacgctaaaggtaaaaaaagaagtcgagatggagaaagggtttcatcctgcaaaattgaaaatagtaaaagatcagattctagccgtttcttttgatgggaagctgcagatatttgataaaaaaatggttaagaaaaactctttcaatttttatgcgggggatgataacaaattaatgaatgatgttcaattcactgacagagagatgtatgttttactcaaaaactttgatatccagcgcgatcagaagcttggagacatcacgtcttatgatttgaaatcaggcaaaaagctaaaaacaatcccgctaaaagcaaacaaagagtgggaaattgcacgttttgaaattttaaaataagttgagatgattagatcaactcagttacattctgcatatattatactcatcattaccggaagattccagcatggttcaggtgtaaagggcaataagataagcgaagggatggattgacatgaatagtatcaggtacatattgtattttgtgatttctttcgttttacagcttctctggttcttcttagtaaaagaaaattctaatgcaactatactagacatgttgataatgtctctattattcacattatttatgttcatcttagataaatttctcaaaaaaaagcaggctgcatagggactgctttttttgttgtagacttaaaactcaaaccaagatttatgatcaagacgaatgaaattttgcggttttattgcggacatacataattttggaaatgttagaatatgatataaaaggaggagtggccttgtgagttctgttttaccatcatcggaggttggcgttaagattaatgaatggtacaaaatgatacgtcagttcagtgttccggatgcggagattttgaaagcggaagtggaacaagaaataaacgagatggaagaagacgagtatttgctgatttactacaccctcatgaaattccgtcatcagcttatgctggattatttagaaccggtgactacccgtgtgagaccgacaattgatgagctgttggaaaaaatcgaagcgtcaaataaaggaatttccggcctgctgtgctattattctttatttttccgcggcatgtatgaatttgatcaaaagcagtatgtaaaggcgatcggcttttatagagaggctgaaaaacaactcgttcatgtgcatgatgaaattgagagagcggagtttcattttaaactggctgaagcatattacggtatgaaacaaagccacgtctccatgcatcacgtaaagcaagcgctcgatatttacgatcagtatgagttgtataaggtcaggaaaattcaatgtctatttgtcgtatcagggaactatgtagactttaaacgttatgaaaaaagcttgccgcatttagaaaaagctttagagttgtcgaaacaagtaaacaataatgaaaggctgctcagttctgcttattacaacataggaaagaattacggagacttagaagaatacagtaaagctgaaatctacttaaaaaaagcagcggagatatctgaaaagtataaattgggtaaccttccacattccttgtttacatacgcaaagcttctatttaaacaagggaaaacaagcgaggcgattcaaatcagcaaaaagggactttcatcagcgatatttcaaggagataagctgtttgaatctctgcaaaaatatttggaggctttatatattaatgcaatagaccaaatgggaatcaaaaaaacaattgattaccttgagaaaaataaaaactattcgtatgtagaagatattgctcttgatacggctgctgtttatgcagagtcaaagcaatatgacaaatcttatttttatcatcaaaaaatgattcaaacgcaaaaacaaattcagaggggagaatgcctgtatgaattttagaaaaggcgtatttatcattgtgtcggctgtcgttttaatgtcaggggtcggtctagcaacatcggctgtttcatttgatggatcatatcaagtttcgtctgatcgtaatcaaacctaagaaggagaatgcctgtatgaaaaaaagcatcttcattattttgggtctgtcgttatctttagtatgcggattgggtgtgaacacagtggaaaaaacacatgatacctttcaaactgcttcggatcgttttcagacttgaacagcaaaagccttttcttcgggaaaggcttttttagtttagattagagtctgctgaaaatcataactaacggctgatgatgtcaacggaagcagattttgacggcagcattttttgagaattaagctgaatcaatcccacttaaatagggtgcgggagaacacccgcatccctatctctaacgatttcttaaccgatcagccgctgcattctcagcgcgagccgcaggcgcatcgtcgtctccggatcttttaagcttttgccgagcagttcctcgcatttttctaaacgatagatcaccgtatttcgatggacgtacaggcgcttagccgtttctgaaatctggcagtgggtctccaggtaaacagacagcgtatgaagcaggctctggtcctccttttgccggtcggccaggctttggagggtggcttcgtaaaacttcttcacatcttccgcgggaagcaggcggagcagctccggcacgtctttggcatgatagatttgaataaactccgcgcttctggacaaatgcccggatgaaatggcgtcagatgcttcggtaaaggcgtcagggacgtcgatcagcttttggcatatgtttgagatgccgaaggagacagtccgtttaaactgcgtccggacctgcttttgaaactgctccaaaaagctgatgacagacgcgtgcatttcattccagctgtctgtcgcctcaattaaaagaataccgacatttcctttaataaagagatgagggggaaacggaaaggatgacagctccccttcaagcagatcaaatacatgatcagaaacgagctgattttcggtaaagctgatcgttttctcatttcggtcaagttttccgcaaatgcacatgtatttttgatcccagcggagccggaattctttggcacggcttttgatttcttcatggccggtaaacgagcggtcgataaaattgctgaaaaattcattgcgcgcccgtctgccgaattgtttgacggcattttctttcagcagttcaaaggaaatgacgttggccgcctgttcaattgtcaaaatcatgcctttatcagcggtctgcaccaactccggaatcaccagataaccgcagtttttttcaacattcagaatcggcaggacagaatacgcctttctgtcggacagcatggaaaagcaggtgaaataaggcccggaaagggaataacagatgtttttcaataaagacgtgtcaatgggtatgcggtgggacgatgataagagttttgtatgctgatccaaaagcagcacgggaagccggagaatgtctgagagcttcttaagcagggattgcagtcctttgccgctcatgatgtggtttgtaaattttttatgggcgtaaatggcctgctgcagctcatttgaacgcatatcaagaatatggctcagtgtggcgttgacgatatctcccagccggatgtcttccggcagctcaataatcggaaattcataccggtcggcaagctccgcggcatctttcggaatgacatcaagataacgcttcgttttgatccccagccccgcgcagccccgttttgccatgaggcggatcaaatctttcaacagctgcgggcggtccttcaagtggtaagccgtcgtgacgagcagttcatttttatgtaaaaaatcagcgatgtccggcgcatccatcatattgacgtgctgcacctccctccagccgccggatctgcctgcgattattgcggcccgctcataagcgggaatcttcatcacatcataaatgttcatcagtcaatctcctttcaggttctaaagacaaccattggttaatatgaataaaaatcatcaaaaattatagcggttttgctgatgtattacgatcatagtagcagtaaactgacaatcatagacgcatgttgtgataaaaactgacagaaaatcgtcatccttacagggaggaagataaaatggcctatgacgtaattgtaaagggtgcgaaagctgtgcgaaaaggcggaacagagcaggccgatatcgccgtcaaggacgggaaaattgccttgatcgggcccggcattgacgaaaacgcggaacaagtggtgcaggctgacggcatgtatgtgtttccgggcgcggtcgattgtcacgtgcatttcaatgaacccggccgcgaagaatgggaaggcattgaaaccggctcaaacatgctggctgccggcggctgtacgtcttattttgatatgccgcttaactgcatcccttcgacggtaactgctgaaaacctgctggcaaaggcggaaatcgccgaacggaagtcagcggttgattttgcgctttggggcggtttgatgcccggatataccgaacatatccggccgatggcagaagcgggggcaatcgggtttaaagcgtttctgtctaaatcgggaacggatgaatttcaatcagccgatgaacggactcttttaaagggaatgaaggaaattgcggcgtgcggcaagattttggctctgcacgcagaaagcgacgccctcacccgattccttgaagccgagtacgcgctccaagggaaaattgatgtccgcgcttacgcttcctcccgtccggaagaagccgaatgcgaggctgtacagcgggcgattgaatatgcgagagcgacgggatgcgcgcttcattttgtacatatcagcacgaaacgggccgtgctctccattcagcaggcgaaaaaagacgggttggatgtcaccgttgaaacgtgtccgcactacttattattcagctttgaagacttcctcaaaaaaggggcggccgccaaatgcgctccgccgctccgctcagaggctgataaagaggaattgatcggagttttggctgagggcctgattgatatggtgtcttcggatcattctccctgtcatccgtctttgaaacgcgaggataatatgtttctgtcgtggggcgggatcagcggaggccaatttacgcttctcggcatgattcaattagcgatcgatcatgggattccgttcgaacatgtggcccgatggacggccgaagcacctgccgagcgcttcggtttaacgaataaaggacggcttgaagaaggatttgacgctgattttgctattgtccggccggaaccttttaccgtcacaaaagaaacgatgttttccaaacataagcaaagcctgtatgaaggccgcacctttccataccgaattgctgcgacctacagcaaggggcgctgtgtgtatcaggatggtgtgggtaagcagagcggggctttcggaacattcctgaagccttctgatataaaagagccgattctctgatgagaatcggctttttttgtcgtttggaaagcgggtctcgtggtatctttttataaaaaggagtaaaacacattgtataatcaaatcttgaacatattaacggcatcctggtcgcgcaagaccagtacaaaatggacggaagattgcccggccaaaggccagtgcggcgtaacggctttagtcatccaagatgtttacggcggtgacattctcaaaacaaaaaccggcacaagctggcatttttataaccgaatagacggggagatatatgatttcacgagcggtcagttttcagagccgatcgtctatcagcacattctttcttccagagatgaggcattttcggacaccaatgaacatcagtaccggttcctgaaaagtgcattcagaaaaaacatggaaacagaaagagaaaaacacctgtgataaactagagtgagaggtgaaggattgtgatttatatcggactgacggggtggggggatcatgacagcatctatccgccgaaaacagcgggcccgcaaaaactgcaggtgtattcctcccattttcccatcgtcgagctggacgcgagcttttacgcgatacagcccgcccgtaataatgaaagatgggtcaaagagacgccggaatcttttcaatttgtcattaaggcatatcaaggaatgacgggccatcagcgcggcgatattccctttgaatcgaaggaagaaatgtttgaggcgtttaagctgtcattatcgccgtatatagagcatggaaagcttgccatggtgctgttccaattcccgccgtggtttgactgcaagaaagaaaacgtcgcatatttaagatggtgcaggcagcagatgggcgatattccgtgcgcgcttgaatttcgcaaccggtcttggttttccccgccattttatgaacagacgctttcctttatgaaggaggaaggctggattcacagcatatgtgacgagccgcaaatcggcgagggcagcattccgaccgtcctgaaagcaacggatgaagaaaaaacgcttgtccgttttcacgggcggaacaagcagggctggatcaaaccagacggcggacaaaactggcgtgaggtcagatatttataccgctataacaaacaggagctcaaagattggaaaaacaatcttcaggagctgaaaaagcagtcgcgcaatctgtatgtgctcttcaacaataactcaggcggagacgccgccgataacgggcttgagatgcttgaaatgttagatatctcatataccgggcttgctccgaagcagctcgacctattcagctagaaaagaggtttcaagacacatgtcttattttattttgatcatattgggatttatcgcgggaacggtcggcagcctgatcgggcttgggggaggaattatcatcgtgccggcgatgctctatttaagcacgatgactccgttttttcatgacgtaacaccgcagactgccatcggcacgtctcttttggtgattatttttacgggactgtcatcaactctggcctatatgaaatataaaaccgttgactacaaaagcggactgatcttttttatcggttccggcccgggaagcatcatcggcgcgtatttgtctaaactttttaatgcgcatacgttttccgtctggttcggactttttatgattttgatttccattacattaatgctgaaggcgaaagcaaaaccggtcaataaagcgcataaaggcatgatccggacatatgaggatgaatcaggtgagctttatacatattcgtaccgtattttcaccggtatcgtgattgcctttttcgtcggtttattgggcggtcttttcggcattggcggcggctctcttatggttccggccatgatgctgttatttttgttcccgccgaaagtggctgtggcgacgtcaatgctcattattttcttatcctccgtgacgggttccgtgtcacatatcgcagagggccatgtcaattggctgtatgcgctgtgcctcgttccgggcgcgtggttcggcggcaaaatgggcgcgtgggtcaataagcgggtgcagacgaaaacgatcgtgcttttcatgcgggtcgtcttgattttgatcggctgtgaattaatttatcaagggatattcagctaaaaggtaggagagatggtatgttagagaagctccgtttatatcatacgaatgatttgcacagccatttcgaaaattggccgaaaatcgtacattatattgagcagaagagaagtgagcatgaaaaaaacggggaggaaacactcgtatttgacatcggcgatcatatggaccgatttcaaatgataacggaagcgaccttcggcaaagcgaatgtcgacttgttaaaccggcttgagatcgatgcggctgccgtcgggaataatgaaggaattacgctgcctcacgatgagctggcggatttatatacccatgccgcgtttcccgtcattgtgtccaacctgtttgacgcggacggacagcggccggaatgggccgagccctacgtgatcaaaacgctgaaaaacgggatgaccgccggcatactcggcgtcacggtgccgtattatcccgtctatcaaaaactcggctggacggtgacggatgcggaaaaaagcattcaagaatcacttgacgatatcaagggcaaagcggacatcatcattctgctttctcatttaggcctgatcgatgaccgagccgcagcggaaaaatttccggacatcgatgtcattcttgaatcacatacgcaccaccttcttgaggacggacaggacataaacggtgtattgcttgcatgtgcggagaaatacgggaactatgtcggctgtgtcgagctgacgatagaaagtgaatcacgaaccattgtcagcaaacaggcatctgtacagaaaatggctgattggcaaggggaatctgaagatacggcagcttttctgaaagagaaagaacgggaagcggaaaacctgctctccgaacaagtcgccaatctgaatgaagaagccggcgtgaagtggtttgaggaatcgccgctcccgcttctattagccgaagcgctgaaaagctggtgcggctgtgaggtcagcatggtgaattcaggcgtcattttggggcctttacagaaggggcctgtcacaaagcttgacctgcaccgtatctgccctcatccgatcaatccagtggccgttcgtctttcaggcagggaactccaggaaacaatcagccaggccgcctcggaacaaatggagcagctgcggataaaaggcctcggcttccgcggggaagtgatgggcaggatggtatatgccggagcggaggcagaggccggcattcttgaagacggtgtgacgcatcttctcaatgtgaaagtgaacggagaagagattgatccggagcggatatactcggttgccgttctcgacatgtttacactcggaaagctgttcccttacatccgcgattcaaaagaaaaacaatactttatgccggagtttttaagagatctgctcgcctggaagctcgcgcggcagcggtaatgtcatatagctgtccgccgttccatttcacccgagtgaaggtaagcgggactttttaagagtaaaaataaaatactatgtcccctcttacaagcatacattgtgatatgtaaggggggatttttcttgcctagataccggagcgctcttcgcaagagagggcctttgccttttcgatatgtgcttcttctgtcgtttgctttttttatcatatcgacggtcatcagcctctggatgatcaactcctcaatcaaaccggtgctgatgaacataggagaaatggaaaccaaacgggtggcgacagaggtcattaccgaatccattgaagaatacatgtctcacagcgacaatgtgaaagatatggtcgatatgaaaacggatgaaaacggaaaagtcacaacgatggattttaatacacaaatggtcaacagtatgaaggcgaaagtaacaaagcagcttcaggctcatttgaaggaagtggagtcgaacaataagcagcatgaaacggaaaaaggcgcaaaaacggccgatgaaattatgatcgatattcccttagggcaggtcacgggaaacagcattctcggaaatcttgggccgaaaatccccgtgcgctttaacctgatcggtgatgcgttaactgatgtgaaaacaaaaataaagccgtacggcattaacaatgccctgattgatattagcatctttgtggaaataaaagtgaaggtcattattccgtttgccagtaagacatcagtcgtgacaaataatattccggtctccattaaagcgattcaaggagaggtgccgcagttttataacggaagcggcgggtcaggtgtgacgccttccgtccagctgccgaatgaaaaacagaagaaagataaataaaaacacacagccgcaatctttcctggcggctgtgtgtttactttttcctgcggatttctttacgctcccatgcccttaaatgaggatacggatcaaaagaccattccgatctgccgttatctttatacatcccgtagtgaagatgcggcggaaattttcccgcggtgcccggcggtccgtatccggaactgccgacagagccgatcacttcaccgggtttgacgatctggcctttatgcacaccttttgcaaagccgttcaggtgagcgaagtagtgatacgtgttattgatatccctgatgccgattctccagccgccgaaacggttccagcccttcatttcaacaataccgtagcaggtcgatctgacgggaagcccgtaatgagcgaacagatccgttccttcgtgaatccggcgcccgccgaaaccccgggcggcgccccacgtgctgcggtagctgtaatccgtcttcacgggaagcggaaaggcgtgctctccgagatcaaggcggccgaacgttttaaacagtgtcatgaattcggtgataatgccgaccgtctgatcacggcggtaataattccagaggccgatgcggatatggtcaagatccgttccgaatcccgctaaatactgtgcaaatgtataaaggatatcctcatcattgctgacctcggcttttccgtcgccgtcgccgtccaggccgatcccgtcaaatactttaatgctgagaggcgcatcgtccttaggatttggattttcggggccgctccacaaatgatccggaatataaatgctgatgattcccgctttttccggcagatcctttcggttcgagcggacattttcttcatattgatcaaccgccgcaagcacataccaaggaatctgcgtgactgcttcggctttgcggtacaactgcatccgttcgccgtaaacaggagccgattgttcttttccgcttgcagccggacagaaaactgataaaaggagaagagcagataacagaactttcacaacatgatctcctttcaggattgaatacacatagtttgcggcaacaatccgagaaaatgtaagtaattctcttcccttgtcgagaaatttttcctatgttaaagtgactattgaatagaaatccgcaagttttacatccatcgtgaaatagaaatttttcgcacacgaacatgaataaagggataatggagatgatggggaaatggcaaagaaagacgagcatctgagaaagccggaatggctcaaaataaagctgaacacgaatgaaaactatacgggcctgaaaaaattaatgcgtgaaaataatctgcataccgtatgtgaagaagcaaaatgcccgaacatccatgaatgctgggctgtcagacgtacggcgacgttcatgattctcggttccgtctgtacgagagcatgccgcttctgcgctgtaaaaacgggactgccgactgagctggatctgcaggaaccggaacgcgtagctgattccgtcgcgctgatgaatttaaaacatgccgtcatcacggccgtagcgcgtgatgatcagaaagacggcggagcaggcgtctttgcggaaacggtccgggcgatccggagaaaaagcccgttcacgacaattgaagtgctgccatccgatatgggcggaaattacgacaacctgaaaacattaatggatacccgtcctgatattctgaaccacaacattgaaaccgtccgccgcctgacaccgagagtccgggcccgcgcaacatatgaccgttctttggaattcttgcgccgtgcgaaagaaatgcagcctgacatcccgacgaaatcaagcattatgatcggtctcggcgaaacgaaggaagaaattattgaagtgatggacgacctgcttgcgaacaatgtcgacatcatggcgatcggccaatacctgcagccgtcgaaaaaacatttaaaagtccaaaaatattatcatccggacgaatttgccgaactgaaagaaatcgcgatgcaaaaaggcttcagccactgtgaagcaggcccgcttgtccgttcttcctaccatgcggatgaacaagtgaacgaagcgtctaaaaaacgtcaggcccaagcataagataagccgaaaaaacccaaaacgccgcaagttttgggttttttgtgatggagccgtttttgcagggaaaaagtcattcttgaataaggatcgtctgaaccgctacactggatataaagaggaaaaattctccgtccgtccgaaccgtctcattttgcaattgatggacagaagtcaatgaattatgatagtaaagagtgataaaagaggtgaagacatgattcttattcaaaatgccgagtttgaactcgtacacgattttaaaaacggctttaatgaagaagcgttcaaagcccgctattcggacatattaaataaatatgattacattgtgggagactggggatacagtcagctgcggctcaaaggcttctttgatgaccagaatcaaaaagcaacctttgaaacgaaaatcagcacattggacgaatacatttacgaatactgcaatttcggctgcgcgtattttgttttaaaacgaatcagaaaataattgatgcagaagggaatgctgtcacgtgtattttgttgacagaaataatatcgaacaaacactccgtttttttgagacccagctggcgctgtttgacagcatgcctgcatggcagagcgaaatcgaaaaaagggcgcttgagcggatcagccatcttatgatcgaatgcattctcgatgtcggaaatgatatgattgacggctttatcatgcgcgatccgggcagttatgacgacatcatggatattctgacggatgaaaaggtggtagctgaggatgaagggaataagctgaagcagctgatctcttccagaaagcagcttgtccaggaatatcagcacgccgatcatcaggagctgtttacgctgatcacgtcaaacagagatgtgctgaaagcctttccggcccgtgtaagaacctacctggaatcagaattagggcctgtttccgcatttaaataacaacgagtgagaaaatccacaggagtgttgagtatgaaggattataaaggatatttgatagatttggacggcacaatgtacaacgggacggaaaaaatcgaagaagcgtgtgaattcgtgagaacgcttaaagcgcgcggcattccgtatttattcgtgacgaacaattcttcccggacgccgaagcaggtggcggacaagctgatgagctttgacattccggcatctgaagagcaggtcttcacgacgagcatggcgactgcgcagcatatcgcccagcagaaaaaagacgcgtcggtgtatgtgatcggcgaagaaggcatccgtcaggccattgaagaaaacgggctgagcttcggagaagaaaacgcggactttgtcgttgtaggaatcgaccgcggcattacatatgaaaagttggcaacgggatgccttgcgatcagaaacggcgcccggttcatttcaacaaacggcgacgtcgccattccgactgaaagagggcttttaccagggaacggttcgctcacatccgttttgacggtgtcaacgggcgttgagcctgtctttatcggcaagcctgaatccattattatggaacaggcgatgcgtgtgctcggaacggacatttccgaaacactcatggtcggcgataactatgcaacggatattatggccggcatcaatgccggaatggatacgctgctggttcacaccggagtgacaaagcgtgaacatatggccggttatgaccaaaaaccgacatatgcgattgactctttaaccgaatggattgaacatctataaaaaaagggacggccatgacggccgtccttattctgtatttctggcgctgtgagcaagccggcttgaagccgctgctgcgattgcgccgacgatatcatcaagaaacgtatggcattcgcccgtagatttatcatttaaccgcccgagaatgccgggtttttctttgtcaatgtagccgtaattcgtaaagccgattgagccgtatatattcacgatagagaaggcgagcacctcgtcaaccccatacaggctttcatcaatcgccagaatggtctgaagcggttcagacagctttttttgttcggcgagcacatctaattctattcccgttaaaatggcgttttgcacctcgcgttttgcgatgacacggtccacattgagcctgcatacctccatcgtcaaatcaggatgatattttttttgaaggaaatacaccagctcggcaatatcgtccgtctcaaccccccgttcttttaaacgagccctggcgacagcttccacctgattcagttgttccttttctgacatttgcttcacccaatctttttttactagtttatacaacacccttccgatgtgtacgatgtttctccacttgattcaaaggattacaatatgtattcataattccgccggcgtatgactacgatgtgaatagctctaatttttcaggcaggtgattatgatgaaaagcatcattaaagaaaagtacggcatccacgtcagacagctttccgtttatcagaaataccaatgcttccagacgcctaattccttctttcttataattcccgtttccgggttttcgcaatcagagctgacggagctttactacatgagtcagtatttacaagaacaaagtgacccatacgtttcagtgtttatctttacgaaggaaggagaactgacctttgaggacgaaggcaaaacgtatgcgctcttaaaagcgccgattcccgtctcaaaccggtcgttttctgtcggaggggagcttgccgaatttcacagaaaagggcggggttttccgtacgaagtgaaagaagcgggcaggatcggccaatggaaggacttatggggaaaacgggtggatcagctggaatcattctggatgcagaaaatccatatgtctccgcttgaaccgttcgaaaagaaaatgatcgaagcatttccttattattcgggcttagcggaaaacgccattcaatatttagtggatacggagctggatgacaatcccggcgcagaagactcggggacaatctgccatcagcggatggaacgggatacctggtcggaggaatcattgatccgcattccgggcgattgggtattcgaccatgccgcccgtgatattgcggaatatatgcgcagcacatatttgtatcatcgtgacgacctgctcaaagatggttttttgtttctgcaggaatatgagcaagttacgccgttatcctccttttccaagcgcctgttttacagccgcctgctgtttccgctccacttctttgagacggtggagagctattacatttctcatgattctgaaaaacagttttacgaagagcagcttgattacattcttgccgactgcacccgctatgaacagtttttacagacatgtcacaacatgatgaatgtcaggtcggcgcaggtttttgtcccgcctgtagcttggctcggaaaaggaatcagttcgtaagaaaatataacgtaaaaatatttagaaaatagggaatcttgtcatatcagtgtgttaagcgttttcatatccgtagaaacaatattcagccgcttgtcaaaacaaatgcgggcttatataatatttgtaacttaaatgtctgtgaagggttaacaattgtccttttctagtggacgaaaggaagaaaggtggagtttctctttggaatcgattcgtattggactgttaggactgggaaccgtgggaagcggagtcgtcaaaattatacaagatcatcaggataagcttatgcaccaggtcggctgtccggtgacgatcaaaaaagtgctagttaaagatattgataaaaaacgagacgcagacctgccgaaagaagtgctgacgacagaagtctatgatgtaatcgatgaccctgaggtcgacgtgattattgaagtcatcggcggtgtcgaacagacgaagcaatatcttcttgacgccttgaaagcgaaaaaacatgttgtgaccgcaaataaagatctgatcgccgtatatggctcggagcttttagccgccgcaaaggaaaatggctgtgacttgtattatgaagcgagtgtcgccggcggaatcccgattttacgcacgctcgaagaaggcctttcctctgaccggatcacaaaaatgatgggaatcgtcaacggaacgacgaacttcatcttaacgaaaatgattaaagaaaaaagcccgtatgaagaagtgctgaaggaagcgcaggatctcggattcgcggaagcggacccgaccgccgatgtagaagggctcgatgccgcgcggaagatggcgattttagcccgtctcggcttctctatggacgttgatctggacgatgtcaaagtaaaaggaatttcccggattacggatgaagatatcagcttcagcaaacggctcggctatacgatgaagctgatcggcatcgcccagcgtgatgacaataaaatcgaagtcagcgttcagccgacactgcttccggatcatcatccgctctctgcggtgcataacgagtttaatgccgtttacgtgtacggagaagccgtcggcgaaacgatgttttacggccccggagccggaagcatgccgactgcgacatcggtcgtttccgatctggtcgcggtcatgaaaaacatgcgtctcggcgtaaacggaaacagctttgtcgccccgcagtttgaaagaaatctgaagcagccgtctgatatctatgcccagcagtttttaagaattcatgtcaaagaccaggtcggctctttttcaaaaatcacatcggccttctcagagcgcggcgtcagctttgaaaaaattctgcagctgccgatcaaaggccacgacgacctcgcggaaatcgtcatcgtcacgcatcatacatcggaagaagatttcagtgacattctgcaaaacttaaatgacctcgaagtcgtacaagaagtaaaaagcacatatcgcgtagaagggaacggttggagctaatgtggaaaggactcatccatcaatataaagaatttctgccggtgacggatcggacgccggccctgacattgcatgaaggcaacacgccgctgattcacctgccgaagctttccgaaaagctcggaattgaactgcatgtgaaaacagagggcgttaatccgacgggatcctttaaagaccgcggcatggtcatggcggtcgccaaagcgaaagaagaaggcaatgataccatcatgtgcgcgtctacaggcaacacatccgcggcggctgcggcatacgcggcgagagccggcatgaaatgcatcgttatcatcccggacggaaaaatcgccttcggaaaacttgcgcaggccgtcatgtacggtgcggaaatcattgcaattgacggaaactttgacgacgcgctggccatcgtccggtcaatttgtgaaaaatcaccgattgcattagtgaattcagtaaacccttaccggattgaagggcaaaaaacagcggcctttgaagtatgcgaacagctcggcgaagcgccggacattctggcgatcccggtaggaaacgccgggaatatcacggcctactggaaagggttcaaagaatatcatgagaaaaacggcaccggacttccgaagatgcgcggttttgaggcggaaggttctgcggctatcgtccgcggtgaagtcattaaaaatccagaaaccgttgcgacggcaatccgaatcgggaatcctgccagctgggacaaagcagtgctcgctgcggaagaatcagccggaaaaattgatgaagtcacagatgaagaaattcttcacgcttatcagctgattgcccgtgaagaaggcgtgtttgccgaacctggctcctgtgcatccatcgccggcgttttgaaacaggtgaaatccggtgaaattccaaaaggcagcaaggttgtcgcagttttgaccggaaacggcctgaaagatccgaacacggctgtagacgtatctgacataaaaccgatcacgctgccgacagatgaggacagtattctggaatacttaaatggagcggcgcgtgtatgaatgaggcggagatgctgttttccattacggttccgggaagcacagccaacttagggcccgggtttgattccgtcgggatggcgctcagcagatatttgaagctttcggttttccgaaacgatgaatggcagttctcggcggaaaccgaaactgtcgcgggcacccctcaaggaacggacaacctcatctaccaagtcgccaaacggacggctgaccgctatcagaaagagctgccgcccgcccatgtcaaagtgtggagtgacatcccccttgcacggggcctcggaagcagcgcggccgctattgtcgccgccattgagcttgcggatgagttatgcggcctgcagctgtcggaaagcgacaaactgcacttagcgagtcttgaagaggggcaccctgataatgccgctgcttcccttgcaggagggcttgtgatcggccttcacgaagaagatgaaacacatatcgtgcgtgttgccgaagcggatatcgacgttgtggcagtgattccgttttacgaagttctgaccagggacgcaagagacgtgctcccgaaagagctgccgtaccgacgcgccgttaaagcaagcgccgtcagcaaccttctcgttgctgcgatcatgtcaaatgactgggcgctcgccgggaaaatgatgagaaaagacatcctccatcagccgtaccgcgccatgcttgttcctgagctttcaaaggtggaacacgcggccgaaatgaaaggcgcttacggaacggcgctgagcggagcgggaccgacgattcttgtcctgattgaaaaaggaaagggagaagagctgagaaaacagctttctgagcatttcccccactgtgagattgcggcgcttaccgtcccgtcagaaggaagcgtaattgaacggaatcctttagagcaggtgaaaagtgtataatgataaaaaagcgttcttcccatcagagaaggacgctttctttttctggagaaggatttttatttagggaagcgaaataaaaaagaaaaggaggagaaatgatttgaaaaaactcataaccgaggaggacattgcgactctcgtatccgtgacagacccgcaatatgcccctgacggcagaagagccgcttacgtccggacaacagtcaatcataagcgtgatgcctattcctcagccattatggtatatgacacagaatccggcatctcaaacccttggactttcggggacaacagaaatacaagtccgcggtggtcgcctgacggacggcgcctcgcctttgtttctgacagggagaacggcatccctcagctgtacatcatcgacgctgccggcggagaggcggagcaggcggccgatattccttggggcgtatcagatccgatatgggcgcccgacggcagatccgtgcttgtgtccgtcagtctgacatcagcggagcgcgccgatgagaaagaaaaaaagaagcatgacgagtatgagccggttgacattcagtcattaacatataaacgtgacgggaaaggcctgctgaacggaagctgggcccagcttgtgctgattcatcttgaaacgggggagattcagcagctgacggatcatgaagcggatcattatgacgcggccttttcaccggatggcaggcagcttgcgtttaccgccaatttatacgagccgggtgacgccggaaagccgagcgatgtctatctgatgaatctggcggatggaagcctgaagcagattacgccgcaccgcggttctttcggttcctgcgtgttttcaccggacggttcttatatcgcgatgctgggccatgaaaatgaatttcgcaatgcgactttagaaaaagcgtggctgtacgacgtgaaaactgagcggctgtcctgcctgaccgacatgctggatgttcatttgagcgatgcgctgattgcggattcaatcataggaggagtgacgccccggccggtatggacaaacgacgggcagggcttttacgttctcgggagcgagcagggaagcaccggtatttattatatctcgattgacggcctcgtatatccgatccgattagaagaagagtatgtgaacggttttgcttttcatcctgatcagaaaagctgtatcgctgtcattgccaaacccgcacagccttccgagctttacagcatttcacttgaagatggggaagagaagcaattgacattcgacaatgatcggtttattgaggagcgtatcatatccgtgccggaaaagctgcaatatgaaacaaaggacgggctgacggtaaacggctggtttttaaagcccgccgtttttgaagaagatcaaacttatcccctcattctatacatacacggcgggcctcacatgatgtacggccatacgtattttcacgaattccaagtgctggccgcacaaggatatgctgtcgtgtatgtcaacccaagaggaagccatggctacgggcaggattttgtcaatcgtgtcaggggtgattacggaggcggagattaccgtgatgtcatgcaggcggtggatgaagccattcaggcgtatccgtttattgacagcggccgtctcggtgtgacgggcggaagctacggagggtttatgacgaattggattgtcgggcagacagaccgttttaaagcagccgtcacgcagcgctccatttcaaattggttcagcttccacggtgtcagcgatatcggtttcttttttaccgactggcagctcgggcatgatttgtttgaggaagcggataagctttgggatcgttctcctgtaaaatatgcgtcccgcgtttcgacgccgcttttgattctgcacggtgagcgagatgaccgctgtccgatagagcaggccgagcagctctttaccgcgttgaagaaactgaacaaaacgacgtcgttcatccggtttccgaaagccacgcatgagctgtcgagaagcggccatccggaacagcggatgaaacgcatccgttatatttgttcatggtttgatgactatttgtaaaaaataaaaaaccaggctgtcatgcagcctggttttacgattaaaatacttgttctacttcaacgacacccggtacttcttcaagaagggcgcgttcgattccggctttcagcgtaatcgttgaacttgggcagctgccgcatgcgccaaggaggcgaagctttacgatgccttcgtctacgtcaacaagctcacagtcaccgccgtcacgaagcagaaacggacgtaatttatccaatacttcctgtacttgctctttcatttcaacctcagtcatgagattcgctcctttcatatacataaaaccattatattcacagtaacggtaaaaatctaatgtttggtttgcaaagctgctttccccattatagcatatttaaacttgaacataaaaaccgttttttatacaaaagctgcctcgtcctttgtatactggtgtaaaggggatgatatacatgacaaagccggttacgctcagtgtttacggcgctgaaacgctttgcgcaagctgcgtgaatatgccgagcgccaaagatacgtttgaatggctggaggcggcgctgaaacggaaatatcccgagcagccttttaacatgcggtatattgatattgatgcaccgcctcagcaaaaggagacagaagagcttgcggagcgcatcagaaacgatgaattcttctatccgcttgtgctggtggaggatgtcattgtgggggaagggaatccgcatttaaaagatatatatgaagaaatggaaaagcgcggctatgttgcgggctcttaaaaatggccgctgatcgcaatcagcggcttttttcttatcagccgttatgatgcttgtacatccataaaaggcctgattttaataaacggggcacacgcccgatgagcggacggtcgttgacaagaccgaagcccgctttttttccgagtgaaccgagaacgcctttcagcttaaattgcggcattgtttccggcagctcttcattgttccagcgtttcaggaggatctgcacaatttgttccgcttgtgcttcagccagctgggcgctcggcgcatgcggcaggctcgcgcaatcaccgacgacgtaaacatgctcatcgcccggaaggttgtgatgcggtgttaaaacgatgcggccttgcgggtctttttcagcgtccagttctctgacggctttattcggctgaattcccgccgtccacacgatggcatcggccggtattccttcatcatgattataaacgatgccgtcttccacttttgtaatattcgcattattgataatggtgacgccgtgttcttcaaaccatttctgaacgtacttgctgagtcttttcggaaagcttgataaaatcaggtcgccccggtcaaataacataatcttcagatcgtcacggctctctcttaattcactggcaagctccacgccgcttaatcccgctccgacgatagcgacagatgcattggcgccgaggttgttcagcttttgataggcttcgcgtgactgatcaatggtctgaatgctgtaagtatgttccggcgcgccgggcacgttatgatacttatcctcgcagcccagtccgatcaccgcgtcatcgtaagaaatcggttcgcggtcatgaaacagaacctgtttgtttttcgtgtcgacggaagccacctcaccgtattgaacatccagattcggatgctcaggaaaagacaccctgatatgatgatcagaaatcgtgccggcggcaagcgcataatattctgtttttaagcagtgatacgggtttctgtcaatcagcgtgatggatatatctgacggaagctggttcggcagtaagcggtgcagcacccgcatgtttccgtaacccccgccgatcaagaccaattttttcataatgattccccttttgcccgaaaaatatggtagtcaatgttgttacaaaataacgaactatgtaaaataacatctagaattatatcgaatttgatctaaaaccacaataatagttttaaaataacctacaaattgaccagaaaacacgtaatagtaaaacctttaacctgaattaatatgttacgataacattgagcgtgaaaccggatctttgacgaatagaggaaattccgttaggataaggtacatatgtgaggtgaaaccgcatgaatccgatgattgaattctgtgtcagcaatttagcgcgcggttctcaggaagcacttgagatcttagagaaggatccgaacttggacgtgcttgaatatggctgtttaagctattgcgggaaatgcatggagtccctgttcgccctggtcaacggcgaagtggtcacggggggcacgcctgctgaattggttgacaacatatataaattcatagaagaaaatccgatgttttaatcagaggctccgaatggggtctcttttttattgcgcccgggttttggcaaaataaaaaatttgtagacagcaaaaataaatattgttatcttaataaagactttttttaaataaaattttagaggtggattcattgaatatcgtttgggggctgctcggggcagttgctatattagccattgcttttttgttatcagagaagaaaagcaaaattaacctgcgaaccgtcattgtcggtttgtgtttacaaatggccttcggattcatcgtattaaagtgggacgccggccgggccgtatttttatggttctcaagccgtgtgcagcttctcattgattatgcgaacgaaggcatcagctttatttttggcccgctgttaaaagtgggcagcagcccggcttttgcgctgagcgttctgccggtcattatctttttctcagcgctgattgccgttttgtatcacttaaaaatcatgcagctcatctttcgcgtcatcggaggcggactgtcaaaacttcttgggacaagcagaacggaatcgcttgcggctgctgcgaatatttttgtcggacagtctgaatcaccgcttgccattaaaccgctgattgcgggattgacccgttccgagctgtttacgattatgacgagcggcctttcggctgtagcgggttcgacgcttttcggttacgccctgttaggcattccgatcgaatacttgctggcggccagctttatggcggctcccgctggtctcgtgttcggaaaaattttaatacctgaaacggaaaaaacgcagacgataaaaggcgattttaatatggacgaagaaggcgaaggcgccgctaatgtgattgatgcagcggcaaaaggcgcgtccacgggccttcagattgctctaaatgtcggcgccatgctgcttgcgtttgtcgcgctcatcgccgtagtgaacggaattctcggcggaatcggcggctggttcggtttcaaacatattacattagaatccattctcggttacgtgttttcaccgatcgcatttgtaatcggcgttccttggcatgaagcgctcggagcgggaagctatatcggacagaaacttgtgctgaatgagtttgtcgcttattcaaacttcggtccgcatattgcggacttttctaaaaaaacgtctacgattatcagctttgcgctgtgcggatttgccaacttctcttcgattgcgattatgctcggcacactgggcggtttggccccaagccgccgttcggacattgcgcgcctcggattaagagcggttattgcgggaacactcgcaaaccttctcagcgcggcgattgccggcatgtttatttagtaaacgataaaagctccctgcatatgcagggagcttttatgtatgaaaaacgggggatatttgtattgtgtccgagcagaagagcttttatactaagtaaaagaaaaaaagttggaggccgatatgaattcattccgttttaccaagatgcacggtcttggaaacagttatatatatgtaaatcaatttgaagaacagctgccggaagaacggctggctgagattgccgttaaagtgtccagcattcacacgggcatcggctctgacggaatgatcctcatctgtccgtcagaaaaagcgcccgtcaaaatgcggatttttaataatgacggctcagaagggaaaaattgcggcaacggccttcgctgtgtggcaaagtacgcatacgaacataagctgacagaagaaacgtcctttttcattgagacgctttcaggtcttgtgaaagcagacattacagaggacaacgggattgtgcgtgaagtcgccgttgatatgggcgaaccgcggctcaccaaaaaagagctgccgatgctcggcaatgaagatgaacggacgatcgatgaaacctttgtttttggagaaacggagctttccggaacagccgtatcaatgggaaacccccatattgtttttccggttgcggatatcaatcaagcgcctcttacaacgctcggccccgtcattgaaaaagacccgagatttccggaaggcgtcaatgtcgaatttgtggaaaccgtcagcgccgatgaacttcatttccgcgtatgggaacgcggctccggcattacacaggcttgcggaacaggcgcctgtgcggcggctgtcgcatccgtattgaacggtgtttctgaacgaaaccgggatatcaccgttcatttagcgggaggcgaccttgtgattaattggcaggataacgggcatgtgctgatgacgggacccgccgaaaccgtatgcagcggcgtcttttatttgtaaacagctcgtttgagaaatactctcctcaaggtttataatagatactagcatcgtttttaaaaaaggaggtctacctatgagtgttccagtaaccatcactgaagcagcggctttgcatataaaagatatgatgaaagagcatgaagaagaaaacgcgtttctccgtgtgggcgtaaaaggcggcggctgcagcggcctgtcttacggaatgggatttgagcacgaaaaaggcgaaaaagacagtatgtttgaacagcacggaatcaccgttttggtcgacagcgaaagccttgatattatgaccggcacgatcattgacttcaaacagtccatgatgggcggtggtttcaccattgacaacccgaatgccatcgcttcctgcggctgcggatcttctttccgcacggccaaaaacgccggtacgccggaagagtgctaagggtcaacccgctattcttaggatgaaaaaatatgacgtctttcttttcgatggcgcttgcaccattgttaagaaaggcgtttatctgtttaataaaagcaaaacccgctcaacagaagcgggttttgctttttcaaagatgttattcaattgtatgtttcatcgcattgtacatatttgccgtatgttcatcggctttatcccgtggcatgcgcagccgttcgactgaagaaccatacccgatttcttgtttgccctctttcagtcctttaaaaatcccatcagcgaattcatccagcggttctccttgagtatgcagccctgctccgcctaaatctgtattcaccgccggaggcgcaacttcaatcacttctacagatgaatcagaaagctgatgtctcagactcattgtaaatgaatgaagcgccgctttcgttgctgaatagatcggtgcaatggcaagcggtgtaaaagccaatcccgaagagacgttaatgacagccgcatcttcttttccggcaaaaaacggagcgaacagcatagacaggtggaagggagcttcaatgttcgttgtgatttctttattgaaatagtcccaattatccttcgcatccgctttcagcacatgaaaacgttgttgaatccccgcgttgtttactaacacattcacttccggataattttctttcacccaatcaaacagtgatatacgttcagatggaatgctcaaatcactgacatatgtaataagatccgggaatgtttcctttgctttttgaagagcgtgctcacgccgtccggtcacgatcactttatttcccgcttttaaaaaccgttctgcgaaagccaatcctattccggcatttccgcctgtaatcagtattgtatttcccgtcagtttcatattatctcctcttttccgattgtttttacatttctttgtcaacatttcagctttgatccaatcaatatattcatcccgcaaataggcatgaaataagacagcagtgattctgtaaaattgatttttagatcatcgggaaacccgccaaaactattctttccttgtcacaatatgatgatacggcttaaagcacggtttaagtcaacaaaagaaccttgtgattccatttcggttactcacatcagacataggtcacgaaaggaaaggtgaacgtgaagtattggaattttcttgatgcgataaagcgtaccgtataacatgggtaagagacaattaaaaaacgtttctgatcaaaacaaaaggacggcgatgcatgtgcaggaaggaaacagcgttgatatcaggccgctcagcctgaatgatgcagagcgagaactggttttgcagacggaaaaccgcatgttttttgaacggtttgccatgtcgagacaagaggatttttatacgctggaaggccggaaaaaacgaattgaacaatcactgaagaatgcggaaaatgacacagaatacagcttcggcatttttcttcaggaccagaccctgattggcacgatcagcctttttcaggtggttcggggttctctccaaagcgcttttatcggttactttttagatggtgaacataacggaaaaggctatgcgacgaaggctgtcaagctggcagtcgattatgcattcaatgagctgaaactgcatcggatagaagccggagtcatgccgcacaataaggcgtcaatccgggtgctcgaaaaagctggctttcataaagaaggcattgcgagaaaaaatgtaaaaataaatggaaaatgggaagatcatcaggtgctggcgatcatacatccggaggatacatgacgatatcctccttttttatatcctgcgtctctttcgacaggttcttcctaaaacttcaaatcaattgtctaaatcatactatttgcaaattcaaaaaaaaaataaagggtacatagcaccaaaaactctgaaagatgtgctctttgtcaacacgtcctaaagtcatatttttcgaaaggatattgattttttgataggattaaactaaattgtaaaagtatagaatagttaatttattttgtaagaaaaggatgataatatgataggtcaattgagcaataaaaaaatatttttaagttcttttttcatcattttgatctgttcattactcttccaattcagtatttcagataaagttctgcagtcgtattattcttccgtcggagaaagtacctacgatatcggggagaaaagtgttcgtacgattgtcatgtttctgcaagggtttatgatcttcacaacttttgtggaaattctgataggcggatttctgttattcgttgccgcttttattctcggtacaaaaaaaccgaaaaaaatatatttgcttctatatacactgacttctttaatctcggcatttaaaatgttgattctttcagttgttaattacttaacggctgattcctcgcttatatattctgccggcggcaccagcttgagtctgcagctgctggacccatttctgctcatatcaatcgcggctctttatgctgccgcaggaaaactgaccgatctcagtaaaggcaagagaatcattttgactggatgttttgttttactaaaactctttactattttcttaaactattttatggcggataaaatttagctcgggagagagtcaattaagctgaattttattataaattaaaaaacagagtagggagatgttatgatgaacttagtaaaatctaataaaaagtctttcattttgtttggcgcggctcttgctgcagcaacattggtttatgcactattattaacgggaactgaattaaacgtggcggcggctcatgcattctcagccaatgctgaattagcttcaactctaggcatctctacagcagcagctaaaaaagcaattgatattattgatgcggcatcaacaattgcttctatcatttctcttatcggtatcgttacaggcgcaggcgcaatttcttatgcaatcgttgcaacagcaaaaacaatgattaagaaatacggcaaaaaatacgcagctgcttggtaaaatcgatcaataaataattgctctttttgtacaagctgcaaaaagagcctctctcccaaatacatatgtaaggattgaaagtatgatagtcaaacaaattgcggctcttatcaaatataataccctgtcatcgtttcgaaaaagaaaggaagattggggcattcctcaactcaacagcaaagtgctgtctgccattattatttctctgttatgtttatatctcgttttcctgggatgcggtgttgtattcgggacaaaactgattcagctgcccctcagcgcatgggggcaatttgttttaatcgccgtttcacttgagcagcttttttgggctgccggcttctttaaagaacatcacaatgcctttctgcttgatacgcgtaaggtcattcatcaattaaaaaaggtgcgttttttacagctgttttctgtttttgccggccaggcgatcaaaaaaaccattttcgtatggtatctttttgtttttccggtctttttgtttttatcaagtgcaggcatgaccgggtctgcggcgatcatcgtatttttcttgggcttcgtttattttcttctcaatttatttttatctatgctgttttcttatgttgtttatcttcttacaaatatgtggagcaaattgttttacttgaaaatcatgaaaggcgttttattcagcgtcagcctgctggttccgcttgcagtcgggtatgccgtttatcttctcgtgtttggggagtataccgcaaaggatctttcaagctttacggagacaccggctttccggaacatcctcatgaatacgccgtatgtatggttagcattccgctcacattccgtgctcgttttcgctgcggtgtttgcggccgccgtccttttaacggcggggatgtttaaactgtggtcggccacgctgaagaaaatggaccttattccttatatgtttttgacaaacgcagattttgcgccaaagctgaaattatatagaaataacaaaatatttcatgccgtttttcaaaaggatctgctgttcttatcgagaattgacgggttttttatcaggaatttcggcagtatgctgtacttgttcatgctgtttttaggtttttgtattccgcttctgtcgcatcattttatcgggtattcggcagccgccatcgtgtctgcggcggttatcattgcgaacttttcgtatcagctcgtcggagatgcgctcaaaacagtattatcagttgacggcgaaataaaaaatcagcatttgtttcaccggaatatcaaacatgcgtggcagctggtatttccgaaagtatgtatttataatctcgccgctcttatctattcgttcatcatcaccattttgattacggtgttttttccgtcttccgcggcgctgacgatctacttgtttattgtgtttttatgttcgggttttttatacagtcttgtccagatttcaagcaccgccttgtatcctaagaaaaactgggagcatctgtacgaaattggagaagcggggaaagcaaagacatataacaacttatacagttctttcattttcattgtgtcgcttcaaatcgctgcgatcacgtcctattttatctataaaaagccggaacttgaaacgatgcttattcattcggcatcaggtatttttgtcctgttcatactattaaactatggagtcatgtttctgtttcttcgcagaatcaatatggcggaaaggtttgcgaacaatgattaaattagtgaatatacaaaaaaactatagtgaaaaacaggtgttgaaagatatttcgtttgaggtgaaaaaaggctcaatctatgctttgctggggactaatggagtcgggaaaacaacgactttgaaaatcatttcgggcctgcttaaaccgacttcaggccgcgtcatgattgacggcaaggaactggattcagaagagggggggcaactatcggctgatatcggttttgtgcccgaccatgcttttttatatgattacttaacgggagtcgaatacttgcgttttacagcggagatgtttcaagtgccgtctcagcggacaaatgattatataaagaatatgttagagacgctgaagcttgctcaagacggaaatcagctgattaaaacatattcacatggaatgaaacaaaaattatcaattgcggccgcgctcattcatcagccaaagatattaattcttgacgagccgctgacgggcattgatttaatcagcggtaaaacgatacggacgttattgaaggagtacgtcaagcagggaaatacggtcctgttatcaactcacctgctggagctggcgcattcgctgtgcgatacgatcggtattatacatgaaggcgtttttgcggcggagtatcagtcatccgagcattcattagaagagattgaagaattggctgagagtatctatacatgatgaaccgcatgttgccggcaatcagaacgtccgccattccgttaaccgcgtcattgctgtttttttcaggcggtgtgatcgctgcgtttttttccgatcactttgtttcgaccgcgtcttacaacggctcgtcaggcgcggttgaactgctgaaaaacaatgcaatcgcctgtctgtttttagccgcgggtttttttacctttgggttgacctcaatcttttatttattcaccaacgggtttattttaagcggctctattatagaaaatctgcatagcggggttcctttttatcagatttttttactgctaattcctcatggtatatttgaagttcccgcgttattattaagtggcgccattggttttaagggcgttgaattggtcatcaggctgtgtttttctaaggaaaaaaagataatggcttcaatgttcaggcatattggaatattggtgctcataattatttgtctgctgatcgccgctgccattattgaagcttacatcacaccaatttttaagtaaaaggagcagaaatcatatgagaagtaaattatcattaatcggtgtgccgattgttatgattatcggttatatcatttctttatcctttgagtggctgtttcctgttcttacttttggggtggcaggactatatctctttatatttgctccggtgcaaaataaattcattcgttacatctttttgtttatttttgtgattaatctgttggccagtgcggctctttatttcggtatttaataaaaaaaatgacattcatattgaatgtcatttttttatcttcgagcggctctgctgtgtgttaaaatctgtcgccgttgaaaatagagttttttacgatcacgtagtcgacattgcggatggcttcgagtgtattgccgccggcgtaagagatggaagattgcagatcctgctccatttcaatcagcgtgtcctgtaaagaccctttatgttcgacatgcatttttttgccttcgacgtttttcttttcgcctttttgaaattcggaagcggagccgaaatattctttgtacagcttgccgtcgatttcgatcgtttggcccggtgattcctcgtggccggcgaataatgatccgatcatgaccatagatgcgccgaaacggatggatttcgcgatatcgccgtgcgtgcggataccgccgtcagcaatgatcggtttgctcgccgcttttgcgcaccagcgaagcgcggctaattgccatccgccggttccgaagccggttttaatctttgtgatgcagactttcccggggccgattcccacttttgtcgcgtcggcgcccgcacgttccagctcccttacagcttcaggcgttccgacattccctgcgatgacaaagctttccgggacatgttctttaataaattgaatcatgctgatcacggcattggaatggccgtgcgcgatatcaatggtaatataatccggcacaagctcctgtgctttcagctcccggatgaattcataatcattttccttcacgccgacactgatggaagaaatcagtccgcgcgctttcatatcccggacaaaagccaggcgtttttccggctcgaagcggtgcatgatataaaaatacccgttttccgcgagccaagccgcgatgttttcatctataatcgtctgcatgttggccggcacgaccggaagtttaaacgtgtgtccgcccaatgtaactgatgtatcacattcagatcggctgtcaacaatgcattttgcaggaatcagctgaatatcttcgtaatcaaatacattttccatatataacacccctaaaagcgaataatagaattaaatcaaattaaaacgttcgtctttttataatgtactttgttttgtcaggaatgtcaaatgatttcatgctgcctcatatgcggtcagcttgtcatccatttgcagtttggttatcatagtagtattgggtgttgtaagacatttgttacgatagatagatttgcagaagaagggaggggccggtgtggaacaaaaacagcccgggcacagcccgaaagcccagaaaattcaggaccggattattttaggcacgatttgggccgtgtcggcgcttgtcattgcgcttgttgtcggaaccgtcatgaattatatttggatatttaaataaaaaagagtctgtgccggcaggacacagactcttttttatattatttttcaaacatgcttgtagaatgcagaggctggacgcgcgctttcgggtccatgtaagccttcgcgttgttcacggctgtcggagcttcgccgaaaccgctggcgatcagcttgactttgccttcatatgtgcagatatctccggcggcaaagaagccttcaatattcgtttccatcgtgcttttgacgacgatggaatttttctcgatttcaaggccccagtttttaatcgggccgagagaagaaacaaaaccgtagtttacgatcaggtcatcaatttcgatgatttctttacggtcgcctttcacttcttcgagaacgagctgttcgatccggtcttcaccgacaagttcagcgggaacaaacggtgtcagcacgttgactttagaattatgcaggttttcgacactgtgctcatgcgcgcggaatttatcacggcggtggatgatgctgacttctttggcgatcggctcaagcatgagcgcccagtccaccgcggaatcgccgccgcccagaacggcaacgcgtctgcctgcgaattgattgaggtcgtcaatgaagtagtgcaggtttttgccttcatattgttccgctgattccagctcaagctttctcggcttaaatgcgccgtttcccgcggtgataataaccgtttttgaataatgcgtttctgaattcgtgacaagcttaaacacaccgtccgcctgtttttcaacagattcaacggcctgctctaagcagatggtctgatcgaactttgccatttgctcttttaagttgttcacaagttcctgggcgcggattttcgggaatccggctacatcataaatatatttttcagggtacagcgcgctgagctggccgccaagctgaggcaggctctcgatgattttgacgctcgcctgtctcattcccccgtaaaaagcggtaaacaggccgaccgggccgccgccgatgaccgtaatatcataaacctttgaatcctcttgcataccaaattgcctcctaattgaaaattgttattaattataacatacaatttaaaaggatgacgagtgccgaaaaccgcccggccgcttcattcttgaaaaaaattgcggccgccgctaatatggggacaaattccaatctgttttttcctgaatgttttgtgattgttccggatagtatggtgatatgcagacatgtgcggttttctaaaaaattttatatttcatttcataaaatcccgccaataagctgaagctaatacaaatgttgatttgattatgcgtctaacagcaaaaaaaagaaggtggatgtgatggcattgaataaacccaaaatcgtggttttaggtgcaggttatggtggattaatgacagtaacaaggcttccgaagcatatcggggcaaatgacgctgacattactttggtcaataaacacaattatcattatgaaacgacatggatgcatgaagcgagcgcaggaacgctgcatcatgaccgttgcagatatcaaataaaagatgtaatcaatgaatcacgggtcaaatttgtgcaggataccgtaaaagcgatagatgtgcaaaataaaaaggtgacgctttcacaaggggacatcccttatgattatcttgtcatcgggcttggcgccgtccctgaaacattcgggattaaaggcttaaaagaattcgcttttccgatcgcgaatattaatacgtcgcgccagctgaaagaccatattgagctccaatttgcgacatacaatacggaggctgaaaaacgccctgaccgcttaaccatcgttgtcggcggagcgggctttacgggaattgaatttctcggtgagcttgcgaaccgcaagccggagttatgcagatattatgatatagatgaaagtctcgtccggatcgtctgtgtcgaggccgccccgacggttttgccgggatttgatccggagcttgtcgattacgccgttcaataccttgagagcaaaggcgttgaatttaaaatcggcaccgcggttcaagaatgccgcgcagacggtgtcacagtcggcaagaaagatgaagagccggaagaaatcaaatcgcagaccgttgtctgggcggcgggcgtgcgcggacatccgatcgtggaggaagcgggttttgaaaatatgcgcggccgtgtcaaggtcaaccctgatcttcgggcgccgggtcatgatgacgtttttatactcggcgacagctcgctctttatcaatgaagagacggaacggccgtacccgccgactgctcagatcgcgatgcagcaaggagaaacggtcgccaaaaatctgggcggtttgattaaaggaggccagcttgaagagttcaagcctgacattaaaggaaccgtcgcctccctcggtgagcataacgctgtcggagtcgtatacggcaggaagctcaaaggcatgccagcgtcctttatgaaaaaggtcattgacaaccgatcgctctttatgatcggcgggctgggcctgacgctgaaaaaagggaagtttaaattcttctgaaaacccgcggccgcgggttttctcttcttttaaaaaagagcgctatcaaaagcatgtaaaagaaaaaaaagaatgtttccgcttacatgagttgttttgttacatattctgacttggtgcttgacaagtaaatatgatatattatcagaaaattaagaaaaagggtgatccgcatgaaaacgacagcaaaaagcacggcggcgtgtccgttctgctcaggtaaagggtattttcaattgcttcttggcggctccgaaacatgtccctcctgccagggaagcggcaaagagagacgatgatttttccagacgttgacttttttaccgcccccgaggtacactgaaagtgctgtagggggtggatgtttgtgattagtttgccggttgtcctgatctcaatcgtactattttttgtactgtttttcggcataggctttctgttgaacatgctgcttagaatgtcgtggattatggctgttgtctatccgattgtatgccttttcattatcagcaatcaaaagatgatcagttacgtgcaggcgccgggggaatcctttcaaagcctgtttcagcgtatcatgtcattagcggttgcggatgtcgtgattttggcgggcggactggcgggagccatcacgtcaggcattgccataaaggcgctcagaaaaagaggatatcaaatgttttaagccgctttcttatttgagaaagctttttttgtgtcgcggcgctttttgtatagcacctcaccgagttgggaacaatgactcggaggagagtgatttcagattgacgataatcagacgcatattcatgatcgtgctctttttgggcgcatgccatgcgacatacttttccataaccggtgttgaagcaaaggatctgacaaactggatgaccgagcatcgcggcgccgttttgaaaaacatgggcactccgtttcaatccttacagaatcagccggaaaagaaggcatcaggcaggataaaaccgctggaagaagcttttgactgggaacgctatccctcacataaggtgacggccaccggttataccgccggagcggaatctaccggaaaatctccgggtcatccgcagtacggaattacatattcaggcgtgaaggtcaaacgcgatttatattcaactgttgcggccgatccgtctgttttcccgatcgggacgattctgtttataccgaattacggttacggggttgtcgccgataccggctcaaaaattaaaggcagccgccttgacctctactttgacacagtcaaggacgtctataacaattggggcaaaaaaacacttgaggtctacatgattaaaaaagggaacggcacagtgaccgaggacgaacttgtaaagctgaacgaaacaaagtcgatgcaagtgttcagaaatcaatacaaaacggtaaaagaataaaaacgcttcagcatctgctgaagcgttttttacataaagagataatctaaaatcaatgtcagcacaataccggtgacgccgccgaagaatacttcaatcggctgatggccgagcagttctttcagtttcttctgtttttccttctcttccgctttctgaaagtccttcgcttcgctgacaaaccgattaaagtcgatgaccagtttattaatgaccgtcgcctgttcacccgcatgccgcctgacacctgtagcgtcgaacatcgtaatgacggcgaaaatcgcggcgactgcaaacaggggcgagtccagcccctgttccaaagcgactccggttgacagcgcagtgacggcggcggaatgggagctcggcatgccgccggtgctcgtcacaagagaccagtcaagttttttggatacgataaattgaataggcacttttacaacttgggcaaaaataatggcggcaaaactcgccagtaaaggaaaattcataagtacatccatatgcgacatcctttctgtatctgctgattccgatcgtatcgaaaaactgcagaaaacgcccttagtttggtaaaataaaatcaatgaaaaatgttttttcattataccactttacataacaaatacccacataaggagtgtgtactcatgttttatgcatctgatcaactgcggcatcccgaaacactggtcatcggtctttttcaaaaaagcacgctgaacggatttacgaaggaattggatgataaattggacggtcatctgacccagctgttaaaggatggtgatgtgtccgccaaacgcaatcgtgtatcaaaagtataccctccggctgcgaccggtatgaaacgtatttattttatcggcctgggaagagaagcggattattcgtttgaagatacgaaagaatgctttgcacgagtatttcagcagattcatcaagataaaaaacaggaagtatccgttttgctcgatacattcgtctccggggaagtgcctgccgccgatgccgctcatgcgctttcagaaagctgtctgcttgcggtttacgaagtgcaggattataaacataaatcgaatgagccggatcaggaactgaaatcagtctgcgccgtgaccgaagaagaccttagggaagtgcaggccggcctgaacgtcggcgcggcatacggccaagggacgaattcagcccgcacgcttgtaaatatgccgggtaatatgctgacggccaccgatttggcgtcatatgccgctgagcttgcggcaaaatacgattttgagtgtgaaattttagaaaaagatgaaatggaagagctcggcatgggagggctgcttgctgttaacaagggctcatccgaaccgccgaaaatgatcgttctgaagtatcagggcaaagatcagtgggaagacgtcatcggcctggtcggtaaaggaattacctttgatacgggcggatattcaattaagccgaaaaccggcatcgtcggcatgaaaagcgatatgggaggagccgcttcggtattgggcgcgatggaaattatcggcgaactgcggcctgaacaaaatgtgctcgccgtcataccgtctacggacaacatgatttcgtccgatgccatgaagccggatgatgtcatcgtttcgctcagcggaaaaaccattgagattctgaacaccgatgcggaagggcgtctcgtgcttgccgacggcatcacatacgccaagcagcacggagcctctgtcctcgtagacgtcgcaacgttaacgggcggtgtcattgtcgccttaggaaacgaaatgacgggcgccatgaccaatcacgccgcgttttatgaacaggtggcggaatcggcgaaagaatccggcgagccgatctggcagcttccgattacagaaaaggataaaaaacgggtgagaaacagtcagatggctgatttgaacaattctccgggaagagaaggccacgcgattatggcgggggcattcattggtgaattcgcggaaaacacgccgtgggttcatctcgatattgcgggaaccgcgacggcgaataaagcgacatgcttcggccctgccggcgcaacaggcgtcatggcaaggacgttggctgttttgactgagcgctttacgcccgaaagataacagcatcccgctgccttgatgcagcgggttttttgatttccaaaatctttagttgactaaagcgcagaatatatgttaactttaattatctactacattagcaaactaaaggattttttggagggactcatcaatgaatgctgttgttgtcgcagtattgcttatgctcgtcttaagcctgctgcgtgtcaatattattatagctttaatgatcggcgcgcttgccggcgggctgaccggcggcttaggcctcggagagacggtgaaggcttttacggacggtctcggcggaaatgccaccgtcgcggtcagctacgcgctgctcggggcatttgccgcggcgctgacaaaaacggggcttcccgatgcaatggtggaagcgtctgtcaaactaatcggaaaaaaggaagattcgcggaaaaaagcactgtcaaaagtgttaatcgtactgattattttaatcatatcctgtttctcgcaaaacgtggtgcccgttcacattgcgtttattcctgtattgattccgccgcttttaaaaatatttaacgaacttgaaatagaccgcaggctgatcgcgtgtgtgatgacattcggactgactgcgccgtatatcgttctgcctgtcggattcggacagattttccaggggatgctgagagataatatggcgtcagccggtttaaaggtgccgctcagtgatatcccgtatgctttaatcatcccgacggccgggatggcggtcggtttaattttagccgtcatcgtcttccggaaaccgaagaaatatgagacgaaggagattgccggactatcgtcttctccttatacgaaaaaaagcattgccatcgccttgatctccattgccgtgtcgcttgccgttcagctctatctgtcacaagtgctcggagtggaaggtatgatcatgggcgcgcttgccggcttgtttacgctgtttatcagcggagtcatgaagcgcaatgaagcggataagctgatcacggacggcatgattctgatggcttttatcgggtttgtcatgcttgttgcggccggtttttcaaatgtattgaataaaacgggcgatgtggcttccttggtcaaagcatcaacaggctttatcggccacagccaatcattgggcgcgctcctgatgctggtggtcggtttattaatcacgatgggaatcggatcatcatttgcaaccgtacctgttattacgaccatattcgttccgctgtgcgctcagctcggattcagcccgatggcgacgatcgccgtaatcggagcggccgccgcggtcggtgatgcgggttctcctgcaagtgacagtacgctcgggccgacgtcaggcctcagcgccgacggacagcaccaccacatttgggatacgtgcgtaccgacatttattttctataacattccgcttgtgatattcgggtggattgccgcgcttgttctgtaaaaaaggctcccggaaaggggagcctttttgtatgctgagaacatcttacgccggatttctgctgaaccccgtcgctttatgaatagacctgtaaacggcaggcgcgattgatgccaataacaatgctaaaatgatatcttttatgaaaaaccatatcatgtaaaaccaggccattccgtagctgatcggagcatgaagccataatttcagcgcaatatacgtataggtcgtgccaatgatataaatgacggcggtaccgatcaaagaggcccatgcataatgcaggcggccgggtttttttgttttttccagcagccatccggctgcaaatgccgccgggatgtaagcgagaataaatccgccgctctttccgataaacggcgcaaagcctgctgagaattgggcgaaaacaggcgcccccgcgagtccggccaatgcgtataccgtcattgcgatggctgcccgtctggcgccgagaagcatcgcggctaacagacaaaagaaaggctgcagcgataacggaattcccgcaacttgcaaaaaaggagccattgatgtaatgttggcgccgacggccatcagtgcggcaaacatgccgataagcgccatatcgcccgcgcgaaggttgcgttgtttcatttgtttttcccccttacacttgtaccagattagcgtaatcgaagggtgattgattgtcaacacagatttaatacaggtttactaaatggagggagccatatgtttttcgggaaaacgaaacaaacaaaacagtcggaacggattccgccaaaccaaaatgtcacaacgaagtttcccgtgcttcacgccggaaatgttccttattatgaagatatgtcaaaatggaacctgcaggtgtacgggcttgttgaccgtcctatgctgttaagctttgacgatatcaaagcctttcctgaagccgaagtgaaaaatgatattcattgcgtcacgggctggtcccgtcttgataatatctggcagggaatacgcgctaaagacatcgctgaaaaagcgggcgtgcacaaagaagccggtttcgtcattttgcacgctgaagagggctggacggccaatctgccgctttctgattttacgcgggagacatccctgctggcatatgcgcataacggcgagccgttaacgccagagcacggctatccgctcagaggcgttttcccccacctttatttttggaaaagcgccaaatggctgcgcggcattcagttcacaaaggaaaaccaccccggcttttgggagaaaaacggctaccatatgaggggagatccatggaagaatgagcgctttacatgggattaagcccctatcactatatagttcttaggtaccttattgaaataaggtgctttttttatatcaaaaatccattgactttgtttggcaaaaaacctattatttgaggtgtcttttgatattgaaaatcattatcaataagcatagataaagcaattgccgcaaaggggatgaacacataatggatggaaaacaaataaagcggggtttcacgccggccggccgatacgcggttccgggcacagaagtaagagaaatgcgctctaaaggaggccgtacgtatcgtatctttgtctcttttcctcaggaagaaccgcctgcatccggcttccccgtcatatacctgctcgatgcgaattccgtattcggcacaatggccgaagctttgcgggtgcaaagccgacggcctgaaaaaacaggcgttgttccggcggtgattgtcggaatcggctacccgacagatcagccgttttccgccgaacggcacagtgattttacgatgccgctttctgaatcagaactgccggtgcatccgcgcggcgcggcatggcccgaacacggaggggcggaagcatttctggagtttatagaagaagaagtaaagcccgcgatggagcgggattatccgatcgacagaggcaggcagacgattttcggccattcgctgggcggtctttttgtgctgcaagtgcttttgacgaggccggacatgtttcagacctatgttgccgggagtccgtcaattcactggaacaagcgttttattcaggaaaaagcggaacgtttgtcagaccggctctctgcggaaaatcttcaagtcagcgtattgctggctgcgggagaaattgaaaaaacacataaaagcagaatcccgcagcacgcagaggcgctgtactctttattatccgggtttgaagatgatggagtccgtactgaatacagcgagtttgaaggagagggccatatttctgtcctgcccgttttaatcagcagggccctgcgtttctgcctgaatccgggagggccgcataccccgtattctcccgcatgagaaaaaacaggcccttcgaactaaatgcggctgattctaattttctaattgactgcatgttttgatttggatatgattgtcttgaatcataattgataatgataatcattatcaatatagaaagggaatgataatatggacgcattgggaatgaaagggaaaacggccgttgtcaccggcgccgctcaaggcatcggagaagcaacagcgcttgcccttgctgaacaaggcgtaaatgtggcagctatagatacaaatgaagacctgcttctcgggcttactgacagacttcggcaaaaaggcgtgcaggcgcaggggtttgccgcagatgtatctgacagtgcggctgtcaataatatcatcgccgccgttgaacgcgacatggggcctattgaaatattggcgaacgttgcgggcgtgctgcggccgggtccggtgcaatctctcagtgatgaagattgggatcaaacattttctgttaatacgaccggtgtatttcatgtgtcaagggctgtaagccggtacatgattgagcggaaaaagggcgccatcgttacggtcggttcgaatgcagctagcgttccgcgtgcttccatggcggcttatgcggcgtcaaaagcggctgccgtcatgtttacgaaatgcctcggactggagcttgcggcccatcatatccgctgcaacatcgtatctccgggttcaacggaaaccgacatgcagcgggcgctgtggcaggacgagaacggagcccgggacgtcatcagaggttcgcttgatacatataaaacgggaattccgcttcaaaagctggcgaagccttctgatattgcaaatgccgttttgtttctggcttctgaacaggcaaaccatattacgatgcatgatttatgcgttgatggcggcgctactttaggcgtttgatttaacgagaaggagggacaaacatgacaaatcaacatgtattgacggaagtgtctgcaaaagaggtgctggacgcttacaagcccggggcgttctttttagcttccccgaaaggtacgatgcttgcggaaggaatgtttgcggaagtgcctgatacagacacggaaaatcagctggattcactgcctgaacgcgtgagacagacgcttcttgaggcaaagaaagccggcatcaaacatccgattgcggccggcgccattccttttgacggcagaaaagcttcccggctttttgtaccgaagaatgtccatacggcaggcccgctttcgtttgcggaatcttccgcagaaaagccgcaatccaatacatatgacatccgtcccgttccggagcctgagggctttatgagcggtgtggaacaaggcgtattcaacattacggacggtccgctcagcaaaatcgtgctgtcaaggacgcttcatctgaccgctgaaaaggatatcgacattcctcaggccgtcaagcatttggcgcagcacaacccgcgcggctatacattcgctgcggatgtgacgggaacgtcagaaacaagaaaaacgcttttcggcgcaagtcctgaactgctgctgtccaaaaacggaacatcgattctgtccaatccgctggcaggttccagaccacgcagcacagatcccgccgaggatcagagaagagcggaagaactgctgcaatcagcaaaagatctgcatgaacatgccgtagttgtggccgccgtggccgccgcccttaaaccgttctgccgtgtgcttgatgtgccggaaaaaccgtcactcattaaaactgaggcgatgtggcacctgtccaccgaggtaaagggagagctgcgtgatccgtcaacgacatcgcttgagctggccatcgccctgcatccgacacccgcggtatgcggaacaccgacagatgcggcaagagaagcgattcaggatattgagccgtttgaccgcaatttctacacgggaatggcgggctggtgtgatgctgagggtgacggagaatggattatcgcactccgctgcgccgaagcggaaacaaggtctctccggctctttgcgggtgccggaattgtcgccggatcaaagccgcaggatgaactggacgagacatcggcgaaattccgcaccatgctccgggcgatggggctttaccaagatgagttgtaaaaaaggagggaacggatcgtgctgactggatttacgccatggccggaagaatgggctgacaaataccgaaaagacggctgctggaagggtgaaacgttcggaggaatgctgaaagagcgcgcggctttatacggaaatcaaactgccgtgacgtgtaaagatgtacattggacctacaaagaattagatgaaagggcagatcgtttagcggcgggactgcataagctcggaattcaaaaggaagaccgcgttgtcgttcagctgccgaatatcgctgagttttttgaagtgattttcgcgctgttccgcctcggagcactgcccgttttcgcgctgccttctcatagaagcagtgagatcacgtatttctgcgagtttgcagaggcgaaagcatacatcattcctgatatgcattcaggttttgattacagggcgcttgccagacaggtgaaagacaaacttccggatttggcgcatgtcattgtggccggcgaagctgaagagtttcaggaactgagcagcctgcataaagagcctgttcagctggaagatgtaagcccggcggaagtcgcctttttacagctttcaggaggcagtacggggctgtccaagctgattccgcgaacacacgacgattacatatacagtttgcgcatcagtgcggaaatatgcggcttggatcatcacagcgtttatttggccgctctgccgacagcgcataattatccgctcagctcgccgggtgtgctgggaactttatatgccggaggccgggttgttctgtcaccgacgccgagtccggatgactgcttcccgttaattgaaaaagaacgtgtcacgattacagcgctcgtcccgccgcttgcgatggtgtggatggacgcatccggttcgcgaagtgatgatttatcaagccttcaagtgctgcaggtgggaggcgccaaattcagcgctgaggcggcccgccgcgtgaagagcgctttcggatgcacccttcagcaggttttcggaatggcggaaggattggtgaattatacgagactggatgatcctgaagagatcattgtcaatacgcaaggcagaccgatgtccccttttgatgaggtgagggttttagacgatgacgggcgggatgtagcccccggtgaagcaggacatttgtttacacgcggcccttacacgattcgcggatattataaagcgccagaacataatgaaagatcattcacagccgacggattttatcagaccggcgatatcgtcaaactgacggcggacggctatatcatcgtcgaaggacgtgcgaaagatcaaatcaatcggggcggtgaaaaaatagccgctgaggaggtggaaaatcaccttcttgcgcatcctgccgttcatgatgccgccatggtttcaatgccggatgattttctcggggagcgatcctgtgtgttcgtcatcccgaaaggagaagcaccgaaaccgggagagctgaaagcatttttgcgtgagcgcggactggcggcatataaaatccccgaccggattgaatttatcgcttcttttccgaaaaccggcgtcggcaaggtcagtaaaaaggatcttcgcgaaacgatcgcccaaaaagtaaagccggctgaaatcaaacaatcttaaaaaaaggaagtgtttacattggctataccgtctattcccgcatatgcgctgccgacagcgtcagatatgcctgaaaataaagtatcgtggacgctgaatccgaaacgcgcggtgcttctgatccatgacatgcagaattatttcgtcgatgcttttgcgaaaggtgaagctccgatcacagaggcgtctcagaatatcaaaaaaataaaagagcaatgcaaagcacttggcattccggtggtgtataccgcgcagccgggcagccaagacccggcggaccgcgcgctgctgacggatttttgggggccggggctaaaaagcggtccttatgaagaaaaggtcattccggagcttaccccggatgatcaggacattgtcctcacaaagtggagatacagcgcgtttaaacggacgaatctccttgagatcatgcgtgaaagcggcagagaccagctcatgattacgggaatttatgcacacatcggctgcctcgtcacagcatgtgaagcatttatggatgatatccaaagcttctttatcggagatgccgttgctgatttttcttcagaaaaacataagatggccatcgaatatgcgtctcagcgctgcgcttacacagctttgacaaacgaagtgctggagctgctgggcggcgcgccggtttctgaaggagaagagaaggtttccgccgtattgacaaaagacctggtgcgggaacaaattgcggcgattcttcaagaatcaccgtctgatattccggatcatgaagacctgctggacagaggtcttgactccgtcagaatcatgagccttgtcgaacaatggcgccgtgacggagctgaagtgacgtttgtggaactggcggagaacccgacgctggaagagtggtggagacttctttcttcccgatctcaaaaagtcttgccgaacgcagattatttataaagggagagaatagaatgcatgatacacaacagctgcctctgacaggcgcacaggccggtatctggtttgcgcagcagcttgatcctgataatccgatttacaatacaggcgagtacgttgagataaacggcgcgatcgatgtgaacatatttaaaaccgctctcgaacgcgtgctgacggaagccgcgtcattacacgcccgcttcgaagagggagcagacgggccgaagcagatcatcaatcctccatttgaggctgcgatcgatgtcatagatgtgagttcagaagctgatccgaagcaggccgcactcagactcatgcagacagatttggctgagcccgttgatatggcggccgggcctttgttccgcgacattttatttcagacgggaccggaacgctttttctggtatcagcgcattcaccacattgcgatagacggctacggtttttcactgctggcacggcgtacggcgcaaatgtacaccgcaatacgggaaggacgtccggataacgggcgctccttcggctctttggaggagctggtaaaagaagaacaagaataccgcgcgtctgatcaattcctgaaagatcgggaattttggatggagaaatttgcggatgaacctgatgtcgtcagtttggcggaaagagcgccgcgaacgtcaacaagttttcggagaagtacggcttatctttctgaaacggctttacagcatgtaaaagcgattccgaactggcatgaagccgtcactgccgcagcggcggtatatgtccaccggatgacaaacgcaggggatatcgtgctcggtttgccgatgatggggcggatcggctcgatttcactgaatattccgagtatggtcatgaatcttctgcctttacggctttctctccgcccggatatgaattttcatgaggccgtcagccaagtggcaaaagaaatccgaaacatccggcgccatcagaaataccgccatgaagacatgcgccgcgaccttaaattgctcggagaaaatcgcaggctgttcggcccgcaagtcaatgtgatgccgtttgactacgcgcttgatttcgccggagcgccaggaaccgtccataatttgtcagcagggcccgttgatgatttgtcaattaacgtttacgacagagctgacggaagcggaatgcgtgtggactttgatgcgaatccggaagtgtacagcgccgaagatattgaaaaccatcaaaaacgcttcctgcttctgttggaatccgctgtgaaagaccagacacaaaaaatcggcacactcaaccttctgcttgaaagtgaacgtctccgcgtactggaaagctggaatgacacgcgcaaggccgagaagcagaaaagtctgccggagctgttttacgaacaggccgtaaaaacaccggaccggccggcaatcatcaccgaaaacgaagagctcagctatgccgaattgaacaagcgcgcgaaccagcttgccggcatgctaaaggaaaaggggctcggaccggaacaatttgccgctttgctgcttccgcggtcacaggagttggccgtgagcatgctggccgttttgaaaacgggagccgcatacctgccgcttgatcctgattttccttctgagcggatcacatacatgctcaaagatgcacagcctgcctgcctgattacaacgatggaattatccggacgcttgccggaagacagtgatgcaaaaaggatcattctcgatgacccggatacggtaaaaaccgttgccgctcaaaatgctgactgtcccgctcaggcggaatgttcgcctttgcaccccgcttatatcatctatacatcgggttcaacgggcaaaccgaaaggcgtagtcgtgacattaaaaagcgtaagcaatttcctcttatccatgcgggaaatgttcccgctcggcgaacaagaccgcctgcttgccgttacgacagcggcgtttgatatttccggacttgagctcttccttccgctcatcagcggggcggggtgcgtcatcgcacgtaaagagacgattcaggaaccgcgggcgcttgcgcacatgattcactcatacggtatttcaatcatacaggcaacgccgacattgtggcattcattagttaccaatgaaccggattctctccgggcgctgcaggtgcttgtcggaggtgaggcgcttccgaaggcgcttatgcatgctctgcttgaatcaggctgtacggtgacgaatctgtacgggccgactgaaacaacaatctggtcggccgcacagccgcttgcaaaaggccatacaggggcgcctccgatcggaaagccgatttggaacacgcgggtatacgtgctggacgccgcattgcagcccgtcccgccgggagtcgcgggcgagctttatatcgcgggcggggggcttgccagaggttattataaccgtcctggtttaacagctgaaagattcattgccgatccgtacggccccgcgggcgcgaggatgtaccggacgggagatctcgtgcgctggcgtgaggacggctcgcttgattatatcagcagagccgatcaccaaattaaaatccgcgggttccggatagaattaggagaaattgagtcagtgctgtcgaaatatccgggtatttcgcaggccgccgtcattgtccgtgaagaccagccgggagataagcggctggcggcttatgctgtctcggatcagccccttgatatcggcggacttcgtgcatatatggccgaaagcctgccggattatatggtgccgggcgcgtttgtacagctgaaagaattgccgctgacgccgaataagaagctcgatcgcagcgctctgcctgcacctgatttttccgctgtcctgtctgacagagggccgcggacaccgcaggaagaaatattatgcgatctgtttgccgaggttctcggtctcgcgcgggtcggaattgatgacgggttctttgaattgggcggacattcgctcttagccggacgcctgatgagccgggttcgggagacgatgggcgcagagcttggcatcggccgtctgtttgatacgccgaccgttgccgggctcgccgcacagcttgacaccgcaaagagcgcgcggcctaagctcaagccgtttgaccggccggagcacatcccgctgtcatttgcgcagcagcgtctatggtttctctactgtcttgaagggccaagcccgacttacaacattccggtgattgtccgcatgtcaggcaagcttgaccaatcagcgctgaaacacgccttttacgatgttgtcagccgtcatgaaagcctgcgcaccgtttttccggaaaataagggatcatctcatcagctcattttatctgctgaagaagcccgccctgtgtttacagtgacacgtgcagacaaaaacgagctccaagacatgcttgccgctgcggcacgatatcggtttgatctcgctaaagagccggccgtccgggctgagctgtttgatcttggtgacggcgagtatacgctgatgattctcctgcatcacatcgcaggtgacggatggtccttgaatccgctcatgcgtgacttatccatagcctatatcgcccggcaaacaggtgaaaaagcagaatgggcgccgctggcggttcaatatgcggattatgcgctttggcagcagcagcttttaggcagcgcgtctgattctgagagcttaattgcgcgccagctggatttctggaagaaaacgcttgaaaatgtaccggatcagctggagctgccgtctgattttccgcgtcccgctgaatcaagctacaggggcggcgtcattccggtcaatatcggccaagagcttcatgcccgtcttctctcacttgccagaaatcagcgcgtaagcctgtttatggtgcttcaatcagggctttccgcgttactgacccggctcggtgcagggaccgatattccgatcggcagtccgatagcaggacgcagtgatgacgcattaggagaccttgtgggtatgttcattaatacactcgtactgagaaccgatacctctggcgatccgagcttttgtgagctccttgaaagggtcagagaaatgaatctcgtagcatatgaacatcaggatgtgccgtttgaacgtctcgtggaagaattgaatccggttcgttcccgatcaagacatccgctgttccaagtgatgctcgcattccaaaatacgcctgaccctgtactcagtcttcctgatatggaaacaagcctgcaaatcagcagtgtcgggtcgtccaaatttgatttgacgctggaattggctgaacagcgccatgacgacggcacgcctgccggtattgaaggcctgctggagttcagtacggacttattcagaaaagaaacggccgaagcacttgccggacgcctgcttcttctgctcgaagatgctgcatcacatccggaaaaaccgatcggaagcttaaccattctttctgatgaagagcgccggaagcttttgccggttaatcgggcaaaacagcatattcagcctcggcagacactgcctgaattgtttgaaatacaggccgccgcaaaatcggatgaaacggcggcagtatttgaagagagcggactcagttataaagagctgaatgaaagagccaatcagctcgcgcacatgatgattgcccgcggcgtcggcccggagcagtttgtcgcactggcgctgccgcgttctttagatatgattgtcgggctgttagccgtcctgaagacgggggcagcgtatttgccgcttgatcctgattatcccgcggaccgcattgcttttatgttacatgatgccaagcctgtatttatgctcaccaaccgtgaaggcgcaagtaagctctctatcgaaagcggcatgccggccttcatcttggatgatccgcagaacaaggaaacacttcggcaatatgccgtcacgaaccctgagaatgccgaccgtattcgtccgctgtcaccgcttcacccggcctatgtcatttacacgtcgggatcaacaggtgtgccgaaaggtgtcatcattccgcacagcaatgttatccggctgtttgagtcgacgcggcattggtatcactttcattctgatgatgtatggacgatgtttcactcctacgctttcgatttctctgtctgggaaatgtgggggccgctgcttcacggcggacgtctcgtcgtcgtgccgcatgacatcagcagatcgccggaagcgtttttacatctcctcgtgaaagagcgggtgaccgtgcttaaccaaacgccgtcagcgttttaccagctgatgcatgcggaaaaagaacacaaagagctagggcgtcagctcgcactcagatatattatcttcggcggcgaggcgcttgagctgagccggcttgaggattggtacagccgccacgcagacaatcagccggtgctcgtgaatatgtacggcattacggaaacgacggtgcacgtcagttaccttgaattagacaaaaacattgccgaactgagagcaaacagcctcatcggctgcggcattcctgatctgaacgtatatgtgcttgatgaccggctggagcctgtgcccccgggcatcactggcgaaatgtatgttgccggaggaggcgtggcacgcggctacttagggcggcaaagcctgaccgccgaacgctttgtggctgatccgtacggcccgccgggaacgagaatgtaccggacgggggatttagcccgcctgcggacggacggttctcttgattatatgggcagggcggaccaccagattaaaatccgcggcttccggattgaattgggagaaatagaagcggttctcgtcaaacatccggatgtcgaggataccgccgtattcgtccgtgaagaccggccgggagataaacggctggccgcctaccttgtccgatctgccggcagcaccttggacacgggggacatgcgccggtttgccgaagaaagcctgccggattacatggttccgtcagcttttgtccaaatgaatgaactgccgctgacaccgaatggaaagcttgaccgaaaagcgctccctgcgcctgacctccaaacggaggtcaccggccggggaccgagaacgccgcaggaagaaatgctgtgtgagctgttcgcagaggtgcttcatctgccgcgtgtcggtattgatgacagattttttgatttaggcggccattctttgcttgcggttcatttaatgagccgtattcgggaagcgatgggagccgagctcagtatcggaacactatttgaagctcctacggtggcaagccttgctgaaagacttgagtcaggaacgggcgcaagcgcgcttgatgttcttcttccgctcagaacggcaggagaagaaacaccgttgttctgtgtccatccggccggcggtctcagctggtgttatgccgggctgatgtcttctttagaggctgattatccgatatacggcttacaggcgagaggcatcggaaaaaaagaaccgcttccgcaaagcttagatgacatggcggcggattatattgagaaaatccgcaccgtgcagccgaaagggccgtaccgtctgctcggctggtctcttggagggaatgtcattcaggccatggcgacacaattacagagccggggtgaagaggtttcgctattggtgatgcttgacgcgtatccgaatcattttctgccgataaaaaatgcgcctgatgacgaggaagccgtcatcgcgctgcttgccctgggagggtacgacccggacagcctcggggatcagccgctagattttgacaccgcgctgaccattctccgccgtgagggaagcgcattagccagcctggacgagtcagtgatgatgaatctgaaagacacgtacattaattctgtcgggttgttaggaacatacaagccgaagccgttccacggagatgtgttgttcttcagatccacgattattccggagtggtttgatccgattgagccggatacttggaaaccgtatattacggggaaaatcgagcggtatgacttagactgccgccataaagatatgtgccagccgggcccgcttgccgacatcggcgcgattctggcagagaaattaaacggacggcgtacagtccggtaaagaaaggaaagagatgatatgacaaatccatttgaacgggaagacggctcataccacgtgctcgtcaatgctgaaggccagtactcactgtggccggcctatctggatgtgccggacggctgggaaacctgcgtcacgaatgaaacccgccccgtttgtctcgaatatattgaaacaaactggcgtgatatgaggccggaaagcctgaaacaggccgaagccgctaaaatgtaataagaaaagcctgccgttatttcggcaggctttttatgcggacatcagccgttaagctgtgtatgatcacaaaatgtataagggtggccttctgcattcgtgcaccatgactgagacagaaaagccaaaaagaccgcggcccactggtctgcaaactggattaaaataccgccgtcgtgccacgttccgttatccttcttccagcgtgtatcaattgggtttccctgattcatatgaatattatgcatgccgtttgtcggcttgaacccgaaaatcttatcagcgcccggctccggcccgaatttagagccgtaaatatagacggtggctttttctgatttggctttttgcatgtacgtctcaataaagtcatttaagtcattatccggaccggtgacttcatgcgggaggggcaccatgttccggggatcaaacaatccgccgcggacataatccagcgccagctcacggctggtttcatcaattggggtatatccatacggaatgttgggcagcagggtgatcgcgcttgcgtcaaaatgatcgcgtgccgcatacagaacctctgattcttttgaacttgacatgacattgatcgcacagcgatagcgcgtatcaggctcgcctagcacctcgacttgaaaatgcggagaatcatcatctgtttcccttttcatatctgacacagtgccttttagtacaccatagtgctgaacagccatatgaatcctcctttttctttcgggatatgaattgatattcgagaccgggggccgtttttccttttatgagaaagaaaaaaggacagcccgctgatcaggctgtcctcttcatatctattaagcttttgcagccgaaccttgcattgctttttcagcaggcacgtagtcatagcctaagtctttggctaccgcttcatacgtgacatgtccgttagccgtatttaagcccgctttgagcgcagggctgtctgcaatggcttgtgccgcgcctttattggcgatttgaagcgcgtaaggaacggttacattcgttaatgcgagcgtagacgtacgcggtacggcgcccggcatattggcgacagcgtagtgaacgacgccgtgtttttcgtaagtcggattatcgtgggttgtaatatgatcaacggtttccacaatgccgccctgatcgatggcaacatcaacaatgacggaacccggtttcatttgtttaaccatttcttccgtaacgagagtcggcgctttggctcccgggatgagcacggcgcagatcagaagatccgcttccgcgacggaatctgcaatatttacagggtttgacatcaaggttttaatctgatgcccgaaaatatcatcaagctgacgcaggcggtctgcgttcaaatcgatcattgtcacatcggcaccgagtccgacagccattttcgcggcatttgttccgacgccgccccctccgatgatcgtgacttttccgcgggatacacccggtacgccggctaataaaattccttttccgccctttggtttttcaagaaactgagccccgatctgcgcggccattctgccggccacttcggacatcggcgtaagcagcggaagggaacgtccgtccgttaccgtttcgtacgcaatagctgtcacgcctttttctgtaagcgctttagctaattccggctctgcagctaaatgaaggtaagtgaataagaccagaccttgacggaaatacgcatactcttcagccagcggttcttttaccttcatgaccatttccgcatcccatacttgctttctgtcctccagaatttccgcccctgctgatacataatcttcatttgtaaagccgcttccgagtcccgctccggattccacaagaacccgatggccgtttccgataagctgtgaaacgcctccaggtgttaatgccactcgattttcattgtttttgatttcctttggaaccccgataatcatgtctgtttcccccaatgtttgtgtgatgcttcaagtgtagcgcgatttttgcgaaaattctttgtttgaaacagaaaataaaaaaacacggatttgtgaaatttcacgaacccatgctgcgaagtttgatatcaaggtaaatcgtaaacttttcattcacattttttaagtcgatttctgcgatctggctgattcttttcagcctgtaattcaatgtattgacatggatgttaagcgctttagcggcggtgttgacgttgctgtcggcatcaataaaatgttcgagcgtttttaccatatcggcttggtgctccctgtcatactgctcaagctttgagagggaatagttcatatagccgctgtgcttgcgtttttcatccaacacatccaggtactgataaatgccgagttccgagaagctgaaaaggtgtttggtttctctcacaaaccgctctttcgcttttaatacggaaagcgcttcctgataggagcggtaaacataagaaatcgattcgtaaataccgccgaccgcaatcgacgcatcctcaattttatatcgttccttcagctgtttttgaatatgaagggcgaagtgctttaaatctttaaaaggctgatcggttttcggcgcggctaataagattaattcatttgaatcaacagtcgccagcatgacatgaatctgctgtgtcgtttcctgcaaatattgcagctgctgttctgtcttttcagtcagctcatcatgtaaacggatgatcatgacgctgaacacggacggcagcgccattccgagcttatgaaacccttcggccatctcggcttcctgataaatatggccggtcagcattttccaaaaaaactcctggccccgctcttcgattttcgttttgcggatctgcaggtgcaaaagtttgttccgcaccgctttggctgccagctgaagtgttttcaggtcctcgtcattgagcttttttttgatctcaagcgcccaaataaatccgagaacctgactgtttttccagatggaaatcgccacgcggttgcttaggcccacctcgtcaatttctttcactttgatcggctggtccgtttttaaaagagccggaatggttccgtctttccacagtttgttgatgactttttccggcaccctccgcccgataatcgtcgacgtccgggccggatctgtacaatcgctgtgcgtgctgtatgcaagcagtttatgattaacgtcttctattgtaatggggcattgaagaacttcactgatatggtcggcaacatcttcaagcctgtcgaaactgtacttaaatggatcctttggattggtcatctgtatccctactttttcatagcttcatatcttgatcttaccatcttgcttttcagactgaaaggcatctttgcagggaaatagactaggacaataagatcattcgatgaaaacgaaaataataagaaaatcatactactacatttacaaaatgtgtaaatgtgccgaaaaatccaatatatcataagactcattttgtaaaattaaaacagatttgtttgactgtgccgaatggttgtttttataataatgacgttcaaaaaataagtgaattagcccatatttaggctgatgacacaggagggtataaggaatatgtctggattaattcgtgtcacacccgaagagctaagagcgatggctaagcaatatggcgttgaaagtcaggaagtcatgaatcaggttgaccgcctgaaccgcatgatttctgatttgaaaggcatgtgggaaggtgcttcaagtgaagcatttgcagatcaatatgagcagctgaaaccttcatttattaaaatgtctgaattgcttcaagatgtgaatcatcagctcgatcaaacggcaaatacgcttgagtctactgaccaagatatcgctaaccaaattcgcggataataagatgaatgaagaaacggagcgcctgattcaatcaagaagacggcgctctttctatgtaagggtgatatgaatatgtatatcgatattacaatagatttaacacattataacggcagcgtcttcgatctcagattgtcagattaccattctgtgaaaaaagtcatcgatattgcccggcaggctcagcatgtatctgttccgccgcgtgaaggctattggatcagagtggtcaataaagaagcggttttttccggagaacaaaagctatctgactgcggcattacgaacggagaccgccttgaaattttatgaaaggacatggtggaatgacagatcataacagatcttatttagaaacagaattagacgccgtccgggaagaaaccgaatcaggcttcacgttcaccttccagcgggaaaaaatcaagcttcttgacgggctggaagcaaatgtgattaaagatgctgatcctttttttcaaaaagaggtctcagtttcagaagacgaagtaaccatcacaatcaaacctccttcttcttatcaggctttccgctatataaaaggaaaagataaaaaaagcaggtggcaatttgcctaccgtctcgtccaagccgtgaaacagcataagctgaaacgtctcaatctgattgccgcccctgaaaatatcgtgtttgataaagcgctgacgccttactttcttcattacggcgtaaaggagagccttccgccttatgaggaagatagagaaagggtgttaaaagagcttaaagcctgtgcggcgcttgcagctgacggggcgtacaccttcgatgaatatttgaagtacaaggagacgcttcacttctctcctgaggtgaaaagcgtgctagaggcggagacgattgaagaactggaagaaaccattcaaaccgcaattgattccctcgaagaaagggacaagacatacataaaactgccgaaaaagaaatggaaaatccaaagatacgccggtctggcgcttgccgtcctccttgtgccgacacttctttactccttatacgttctgtttttcgcccagccgaagcaagaggcaattacagaaagcaaccgctattttttaaatcagcagtacagcaaagtcattgacacactcgctaaatacgatgcggaaagcctcccggaatctgtccagtacgagcttgcttcctcttatgtggcagttgaaaatctgagggaagaacagcggaaaaacatcgggaatctggtgacgctgcaatcagacccgaagcatttcctttattggattgatatcggcagaggggaaaatgaagaagccatcaaaatcggccgcaatcttgagtacaacccgtacatctggctcggacttacaaaatataaacagcaattattagcggatgacagtatgaaagacgacgaaaagcagaaagaactggacgccgtggaaagcgagcttgcgaaggcgaaaaaagaggcggaggagcagcataaagatgcggaggaaaacggtgacaccgccgaagcttccgccggacaggatgagagcagacaagacaaagcgaaagataacaaagagaacgacaagaaagatgagaaaaaagatgaaaaaaaataacagcacacatcaaatggccgcaggtaacgatcaggctgtcaggaggttcgccatatgagtctgttatgggttttttaccgagagcacgtacaaaagattcagctgtctgaactcccgccgtctcagccgattacgatcggtccggatatgaaagatacaatcacggtcggcacacttccgttacggcaaaacgccgcaaccctttatcgaaaagaaacagatcgttatgatgttttcctgggaaataactgtgccggcgaattgacaataggaaatgaaatgccctgccggattgaagaagagacgatgcggcttctgctcacccctgacaaagaagaatcctccgtttattttatcggcgggaaggatgagatcgttttctcatcagaaacagaggaagcggatatatacaaagagccgtcctccgctcaaacaggggctttttatctgcgaaagtcgggaggatgctggtctgttgtccctgatggccaggacgtttatgtgaacggaaagcttgcagaagctcccgaaaggctccggacgggagatgagctgctgtggaattttctgcgtgtgaggctgatggaggacgaccttttagaagtcgttcatcacgaaaagcttcaaaccggtttaaccaaaacggtaaaaccaagcaccgaaacgaaaaagaaatacccgctatatcgaagaacgccgcgcatggtctacgatcttccagaagaccgcgtttcattcagctttccctcgcaggaaagcgaacagaataaccgggggctgtggctcgtcattctgcctcctttggtcatgctgattgtaatgggggttgtcgccattatacagccgaggggcatattcatccttgtctctttggcgatgtttatgatgactctcattacctccaccgtgcagtatttccgtgaaaaaaaccagcggaaaaaacgggaggagaagcgggagcgtgtgtacaagcagtatttagaaaacaaaaggaaagaacttcaggcgctgtcggaaaaacagctgcaagtgctgacgcatcattttcccccgtttgaaaaaatgaaatatttaacctctgaaatcagcggccgcatttgggagaaatcgctggaaagcagggattttctgatgcttcggctcggaacgggcacggtcccggcaagctacgagatttcaatgagcggcggagacctggcgaaccgtgatgtggatgacttgatggagcagtcgcagcacatgcagcgtgtgtataaagatatccgtcatgcgcccgtgaccgttgatttacaagaagggccgatggggcttgtcgggaaacctcagatcgtcaaaaatgaaattcaccagctgatcggccagctcgcgttcttcaacagctaccatgacctgcgatttgtctttatctttcatgaggacgaatataaggaatgggaatggatgaagtggctgccgcaatttcagctgcctcatatgtatgcgaaaggatttatttacaatgaacagacccgcgatcaattgttatcgtccatttatgagctgctgcgggagcgggatttggaagaagataaagaaaaaaagatcttccagccgcattttgtctttgtcatcacaaatcagcagctgatcgcagagcacgtcattttagaatacatcgaaggccggcatgagcatctcggcatctcggcaatcatcgccgcggaaacgaaggaaagcctggcagaaaacattcacaccctcgtccgctacattaatgaagatgagggagacattctcattcagcagaaaaaagcggtgcagatcccgtttaagctggacaggcacgaacggacaaacaacgagcggttttcccggacgcttcggacattgcaccatcaggtcggaatgacgaattccattcctgaaacggtctcatttctggagctgtttcatgcgaaggaagtaaaagaaatcggcatcaggcagaagtgggagacaagtgagtctgcaaaatcgctggctgttccgatcggctataaaggaaaagacgacatcgtctatttaaacctgcatgaaaaagcgcacgggccgcacggattgctggcgggaacgaccggctccgggaaaagtgaatttctgcaaacgtacatcctgtcattggccgttcatttccacccgcatgaagcggcgtttttgctgattgactataagggcggaggaatggcccagccgttccgcaagatgccgcaccttctcgggaccatcacgaatattgaaggaagcagaaacttcagtatcagggcgcttgcatccattaagagcgagctgaaaaaacggcagcgtctgtttgatcaatatcgcgtcaatcacatcaatggctatacaaagctgtataaacagggagaaacggatattccgatgccgcacctgtttttgatttcagatgaattcgccgagctgaaaagcgaagagcctgactttatcagggagcttgtcagcgcggcccgcatcggacggagccttggtgtgcatttaattctcgccacgcaaaagccgggcggcatcattgacgaccaaatatggagcaactcacgctttaaggtcgcgctgaaagtgcaggatgcaagtgacagtaaagaaatcctgaaaaacagtgatgcggcgaatattacggtcaccggacgcggctacttgcaagtcggaaataacgaagtgtatgagcagttccagtctgcttggagcggcgccccttacatggaagatgtatacggcaccgaggatgacattgccatcgttaccgacaccggcttaattccgctgtctgaggtggacgcggatgatgcggcgaaaaaagacgccccggcagaaatagaagccgtagtcgaagaaatcgagcggattcaaaatgaaatgggcattgaaaagctgccgagcccgtggcttccgccgcttgccgaacgtatcccgcgcacgctttaccctgcgcaggaaaaagacagcttcttcatcgcctgcgtggatgagcctgatcagcaaagacaggcgcctctcgcttatacgatgatggatgacggcaacatcggcattttcggctcatccggctacggcaagtcagtggctgccatcaccttcctgatgaacttcgcggaaggatacacgccggaagagcttcatatgtacatctttgatttcggaaacggcacgcttctgccattggcaaagcttccgcacaccgcagactatttcttaatggatcaaatgagaaagatcgaaaaattcatgatccgcatcaaggaagaaatcgagcggcggaaacggctgttcagagaaaaagaagtcagccatatcaaaatgtataattcgctcagtgaagaagagctgccgtttatatttatcacaattgacaatttcgacatcgtaaaagatgaaatgcatgaattagaaacggaatttatccagatttcacgcgacgggcaaagcttaggcatttacttcctgctgaccgcaacgagggtaaacgccgtccgccagtcgctgttaaacaacataaaaacgaaagtcgtccattatttaatggatcagtcggaaggatactccatttacgggcgtccgccgttcagtctcgaaccgatcccgggccgcgtcatgatccaaaaagaagaactgtatttcgcgcaaatgtgtcttccggctgaagcggaaaatgacctcgagatgttccaggcgctgaaagatgatgtcaaagctttagctgagcgccacgccggaacagccggcccagacccgattccgatgcttccggataggctgacggccggcgaattttcactccgtctcggcccggatcaagaaccgttccgcattcctgtcgggcttcatgaggaaaaggtcagccctgtgtactttgatctgggtaaaaataagcattgtcttattttgggccagacacagcgtggaaaaacaaacattctgaaagtgatgctgaatcacctgctgcgtgaaggtacggaacgggtcgggctgtttgactcaattgaccgcggactgtcgcagtatgcgcaggaaacaaaggtcagctatctggatacaaaagaagacgtccggcagtggatcgaaacggcagaagccattttcacggagcgcgaagctcagtatgcgcaggccgtcagaaatggcgatgtgcacaaactcagtttctctccggtcgtgttaatggccgacggcattacaagattccagcagacgatcgacaccgccattcaggacaagctggcgatgtttatgaaatcgtacgcgcatgtgggcttcagttttatcccggcgggcaatcacagcgaattctcaaaaggctatgattccttaacgacggaaatgaaacagatccgccacgcgatgctgcttgtgaaaaaatccgaacaaaatgtcattccgctgccttaccaaaggcaggaaccggacattcagccgggcttcggctatttggttgaaaacgggaaggagcaaaaaatccaaatacctttatgttcagcggaaagggaggccgtcagatgactgaacaacgaaaaagcctgatcaaattaatagccgcggtcgtcatcattctgctgctgccggtgctgttttttcggtttatcggcgatgacccgggaaaacaaaaaatcaacgccacccgccaaatcgcagtcgtgaatgaagatatgggcttacaaacagatgaaaatgaggaagaggaatccgtccatttcggcaaagaagtagcggccgctctcggcggccgtccggattattcatggacggttgtcaacaggagcgcggctgaaaacggtctggcggctaagaagtatgacgccgtcgtttacattccatccgatttttcaaaagatatcttaagctatgacaaggagcgtccgcaaaaagctacgctgacattcaatattcaaagcaacctgaacgccgtcaacaaagaaaaggtgcagcgtgagctagaagacgcccaaaaatcaatgaataaaaaaatgtcggcattatattggaatttcgtctcacaaaaagtgaacaatgtccgaggcgattttgacaagatcgtcaataaagaatcagagtttcaaaacgtcatgtacaatttttacaagccgagctccaatgacttggcaggtgaaatcaagcggcaaaaagacctgattgacgaactgaaaaaatcaatgaatgaagcgcagggcgcggcaaaagaaaaattgacttcggcagatgaagccaaaaccacgctcacagactttgctgatacggtcgagcgctataaacaatatcaagaaaatcagaaaaaactgctgatggccgcgcaggaacaaaatcaaaagcaaatcacaaccggactgaatgccattaaagcacagcaggccgccaaccagttcagcacgatgatgagcgggctgtcttcaggcataaaccgggcgcagacacagcttgaccagacaggatcggctctttttgccgcccaacaggtgagagaagcgcaggttcctgagcaggaacacgggatggcagatattcaatccaatttactgaacaattttttgactcaatataaagctcaagcaagatttgaaacactgaacaacatccaaacccttatgaaaagggatcggcaggcattaaccgttccggaaaaggacccgggggatgacggctcagatgaaccgaaagaagaagaaaaaccggaagaagaaaaacccggcgatctgaaaattgaccttgacgatcagcgtgacgaattaaaacgcatctccgctgaaatcaatcacatttctgacggattaaaagaaccggaaaaagaaaatccggcccctgaaaaaccgggccaaggtgatgacggtgaaaactccggcgataccgatccgaataacggaacgaatcccggagaaggcggaaaaacggaagacggcataaaagatcagcagcctgcttccgataacacaggtgatcaggagccaaaaaccgtccagaccgccactgccgctaaaaacgtcactccgcctgctgatgagccggcggacgatccaaacgattctgaaggggacggcggcacggacatatctgaggcgaaagaaaggctgaaccaagccgcagagcgcattcagcaaattgaaaaagagctggaagagaaacagcagactcataatgaagaactgaaaaaacgtcttgatgctcttgatgaagaaatccaaggccttaaagaccagattgccgaagttgaaaaacgggcagacaaattaaaggaaaatctggaagaattagaagaaacgagaaaacaagacttcaataccgtttacagattgattgtaagaacagaacagaacattttgaactacccgtcattggatagcggccgcaaatctgctcttgaacagatatttgccgctgacatcaatacaaaagaaatatccgatttaatgagttactataatgatttatccctgtatgaggcgacactttatcactctcttgacgtaggcccgctgcctgatgtgaaaaacagggtgctgaaagcccagcaaggcgaagttcaaaccgttctcgccatcaaaccggtggaaacggcaagctgggaaaacctgaaaaacaacaagatgcagacagatgaagacatcagcaatttcattaaaggcatgaccgaattctcggataactacagctcgtatatcagagatgaacaagccggagtgctcgatgagctcgccagcatttcagacagcgcggcgaaagcatccgatcagctggctgaaggcgctgtgcaggaagcggccgcgttcagcggagacggattaaccggaacgatggcgctcggcgctcaggataccgtcggccgcgaagtcctgcaaatgtctgacacgatgggccatctgtcagaacgccagtccggcatcatcagctataccgacaatatgcagcaaagcgtaaatgacgtccagcaaaaagcggacaccctgaacagcaactggggcaaaaacgtcgattccacgaaattgatcagaaatgacgtgtacggcattttagggaacgcgctcgttgacggacaggaaaacggctatgtttacgattatctcgccaacccgcttaaaatcagcggagaggtgccggaagaccgggttcagaatgttccgccggtcgtcattttggtgatcgtcctgatcagcagtcttctgatcggctatttcagctcgtattatcagcaggcgccgcttcttgtcaaaggcgcgctctttgggattttaaacattatggtcggattgatgatcagtctgttcggtctgaatatctactcgcttccggatgatcagacgattaaatggtcagtctttacgattcttttgcttgcggcgagttcagcttttatccgggcagcctttgtcttcagctcaatcaccggatggattgcatcgtccgcgctcattctcttttatgtggcgcctttgatcgacctgattatgccgaacttcacctttgacagtccggtttcgaaagtctatatcgatatacaatacggaacgggtcatctgtttgcgatgggggtaacggttcttgcgatcattacgctgattgcggcggcgcttccgctcgtcattcggctgtttgcggaaaaaacggaggaaagtgatcagtcttatgaggcgtaacacgttcatggaaaaaggattgctgctgtttgctctctcctttttccttttccttccccaagccgcagccgcgaatgaggaaaatactgatgtcaagccgaatgaatatgaaaagaaagacattgaaattcgtacggattacctgcacgacgatgcctactccgaggaaaaaacggcgcttccgaaagaacagaaggatattacctttgatcagccggccgaaaacccggatgacaaactgatatcaaagttgtttacatcgtcagacacggagccgaatacgatcaaagcgcaatcgaaaaaactgggtatcacatttgccgagcctgcggtgaggcgtacctcggcagatatggaaacggaagagaaaaagacttcttatctgctgcctgtcatatatgccgtcttgatcctcctcgggattgcggcgatgatctatctgatcccgaaagtcacggcgcaggaaaaggcaaagcggtaaacgaatcgcttgtgtttgcgggaagacagcccgtaaaataagaaaaaaaggaggagtttcatgcagttttttcttataacaggcgcgtcaaaaggcttgggccgggcgcttacggaacaggcgcttcaagaaggagccgaagtcgccgcgctttcaagaacgataagcggggaaaagcgcgaggggctgacagaatacagtgttgatttaaccgatctggcagataccgggcggcagatgaaggcgattcttgatcaagcagaggagaaggggtactccgctgtcacactgatcaacaatgccggaatggtggaaccgatcaagcgggcgaaagaggcttccgccgaagaattgaaccgtcattacacccttaatctgacggcgcccgttttgctcagccaaatgttcacaaagcgtttcgaagcgttcagcggcagcaaaacaattgtcaacatcacatcgggcgcagcgaaaaatccttataaaggctggagcgcgtattgcagctcaaaagcggggcttgatatgtttacgagaacattcgggtttgaacaggaggatgaagagctgccggtccgcatgatctcattctcgccgggagtgatggatacagacatgcaggctgtcatccgctcttcgtcaaaagaggattttcatgacatcgagcggttccgcaatctgaaagaaacgaaaaacctcagaagtcctgaatacatcgccggcgtcattcactcactggtcgcgggcgagccggaaaacggacggatatacgatatcaaagaatttttgtagagcagcgttcacgctgctcttttttgtttgtacaatcacttcggggtccggcggcatatgatgaatgaaacaacgtataaggggtataagaaatgtatcagatgaattgagtttcttctcgatttatgttaggattctaaaaatataaataaggaggggtttccatgagaaatgtaacgttaatggatgtcttcacccatccaatcgcacaaaagtatttacagcgttccggtgtcgcccatgcgatcgcctgcgcgtttcatgcataccgtcttgccgtaaaagcaggtgtcagcccggatcttgcggcgaaagcggctttactgcatgacgtcggccattatgaatggtacacagacggcaaatgggattatgaaaagtacagaagaaacgatatccatgccattaaaggcgcggaacgggcgcataagctgctcatccggctcggtgaagaaccgaaagcggcgaaggacattgcgctggcgattctgcttcacaccgattcctatctgcctgaaggcgaactggacaagaatacgctccagcaaatcgtgaaacaagcggatgaactcgatgaagaacccggcggacatcatcattaccgccaaatggatcacacggccgcgctcaaacaaatccaaaagcttgatcagttaattgaccaagcccaatatcccataagaagctcagtctaggccactcatgcggccttttccgcttacataactccgcatgctcactaacaccttttccgctccgatagacgtactgtgtcaaagcctttgtccgctgcatatgctgaaggaaaacatagtaaaggggatcagcgaaaatggcccatcaaggaagcccgcaaatcgtctcgttagtggatccttacgtttatcagaccatccataagcttatcggctcaaggtttatcattcaaaccgtcagacgcattatcagaggacggctgattgatgccactccagatcacatcgccattgaagaaacgcatgaccgtgtattttatatcagaaaccgtcatgtagtttccgtcatgcctgattataccgaacgcgtgtaacagcacgaataaggcgcaaaccggaggcggccctatagaaccccggtgcgtcttctttttgagatacatagatgcacggcggctttttttggtacaatcacagtacaagttcacataacaataggaggaaaccgcttgttgaaatcaaaggtccatttttggacgctgcaaattttgctcgttttgctcattatttacgtatcaacgaaagtctcgtttatttttcagccgtttttcggttttatcaccactctgttttttccgattttgatctcgggcattttgtttttcatttttaatccgatcgtgcgcctgcttgagaaaaaaatcccccggacattggcgatcctgctcatttatctcgttttcatcggcctgattgcctttatgttcaccgccatcggaccgattgtggcttcccaggtcacggggctgattaacaatttccctgattacattcatcagattcaagtcttgacggcgcaattatcccattccaaatggtttacgtggatgatgacgcaggattatgtgtcgatagaaaaaatccagcagtctctgacgggatttttacaaagccttccgcaaaatattacggcaagcctgtcggccgtgttcggcgtcgttacgaatatcacgcttgtcgtgatcaccgttccgttcattttgttttatatgctgaaggacggccggcggtttccgctcttggcggtcaaaatcctgccttcttcctaccgggcggaaggtcggaaaatatttaatgacttatatgtcacattggccgcctatttccaaggccagctgctgatttgtctctttgtcggaacggcatgctttatcggatattggatcatcggcctgcagtatgcgttaattctcgggatggtgatcgccgtcaccaatatcattccgtacctggggccgtttctcggggcggcgcccgcggtgattatcgcgtttatggattcgccggctaaggcgctgtttgccgttattgttgtcgttgtcgtccagcagcttgacgggaacctgctttctccgcttgtcatcgggaaacggctcaatacccacccgctcaccattattcttttgcttatcggagcgggcagtttcggcggcattctcgcaatgattctggccgtgccggtttacgcggttttaaaagcttttgtcttaaatatcgtccggcttatcaaacttcgtcagcggtcaaagattgaagacagccgcaagccgaaataaaaacgggcacaactcccgatgcagcgcataaaatgctgtaaagaaaagcggaggtgtgggtatgcctgcaattgtgggaccgatttatattatgagtttagccggagacgctgcggcgagcttcggtgacgtgtttgccatctctcccaaagccgttgaccactcaggcgcgggggcaggggcgtttcattccggagattttgtcaaagtcactaataaattcagcaaaacgcgctttgaagacatcgatgtgtttgacgaacctgattggtttaacgcgtgacagcctccttttaggaggctgtcgcttttttgtagtataatagaatcagtctttataaaggggaatttttatgaaaatcagaaaagcgaatattaccgtgcagtccggaatgatcggtgatgtatatctgcatgaaaataaaaaagaacagcatacccttgtagcggttccggaacttgagtggagcacgatcatttcctatgaggaagagaaaaaggcgctggcgcagcggcttttacaatcgttcagcaagctgattgaagaagagcccgcgggagagctcgccggcaagatctcccattgggtggctgaaatgtaacgaagcggtttaccgcgtcccgtccggggagataattgtaaaacaagctgaggagggacaggccgatgagcgacaaaacggttgacctttatttacagcaggggatgtacggccctctgcagacgaaaccggatgaacgccatttatttttaggctcgctgcgtgaaagagtcatcattgccctgacgaaggggcaggtgctgcaaaagcagccgtatgaagaagtgaaacaggcgctgaaaagccgaaaagacgcggtgctctatataaacggaaggcttccgtatcatgcttattcaccatatatgaagcttgccgcacttgccggtgtccgaagctccgtcatttcggaccttcaattcgaaacgccgctcggcctggtttttgccgccgattatgccgtgaaccttgacggcatttacgttcaggatgacatttttcagcgctcactcctgaaatcttaaaagggcaaaacaccgtttgtcattttacaatgccaattcacttacaagtggagataggatataatggttttcatatgaatggcggggaggccggctatgaaaaaagcatttatatgcattgattatacgaatgattttgcagctgagaacggggcattaacctgcggggaacccgcgagacagattgaagatacgattgtcagtttgacgcaagcatttatagaaaacggtgattacgttgtttttgcggtagattcgcatgatgcagacgatgactttcatcccgagacacgcctgtttcctccgcataatatcaacggcacggagggcaaagagctgtacggaaggctatcgcctctttatgagaaacataaacacgcaaaaaaagtaaattatatggaaaaaacgagatattctgcttttgcgggaacggatttagagctgaaactgcgggaacggcagatcactgagctgcatcttgcgggcctgtgcacggacatctgcgttcttcacacggcggttgacgcttacaacaagggctttcagatcgtcattcatcaaaacgctgtggccagctttaatccggaagggcatgaatgggccctgtcccattttaagaacagcatcggagcgcaagtggcagagtaaggaaggggaaaataattttggtggagcatggttttaaagacgacagtttgtctttacatacagatctttatcaaattaatatggccgaaacgtactggagagacggcattcatgagaaaaaagcgatttttgagctttttttcagaaagcttccctttgaaaacggctatgcggtatttgcgggcttagaaaaagcaatcgaatacttggagaacttcaaatttaccgacagcgatctgaattatttaaaaacggaattgcactatgctgatgatttcattgattatttacgggatctttcttttaccggatctctttacagcatgaaagaaggcgagctcgtttttaacaacgaaccgattatgcgggtcgaagcgcccctgatcgaagcccagctgattgagacggctctgcttaacattgtgaattaccaaacattaatcgccacgaaagcggcccgcattaaaggcgttgtcggtgacgaagacgccctcgaattcggaacgcggcgcgcccatgaaatggatgcggctatgtggggagcgagagctgctctgatcggcggcttcagcgcgacgagtaatgtaagagccggaaagcgttttaatatacccgtatccggcacgcacgctcatgcgctcgtacaagcgtaccgcgatgaatatacggcatttaagaaatatgcggagacccacaaagactgcgtgtttctcgtagatacgtacgatacgatccgttcaggcatgccgaatgcgattaaagtcgcaaaggaattcggcgatcggatcaacttcatcggcatccggctggacagcggggacttggcgtacctgtcaaaaaaagcgcgtgaaatgcttgatgaagcgggtttcacagacgcaaaggtcattgcttcaagcgatcttgatgagcacacgatattaaatctgaaatcgcaaggagcgaaaatcgatacgtggggcatcggcacgaagctgattaccgcatacgatcagccggctctcggcgcggtttacaagcttgtcgccattgaagaggacggcaaactgaccgacaccattaaaatttcgtcaaaccctgaaaaagtgacaacgccgggaagaaagagagtataccggattatcaacaagctgaatcaccactcggaaggtgattatatcgcgctttatgacgagcgggtaaatgatcagaaacgcttaaaaatgttccatcccgtccacacgttcgtcagcaaattcgtcactgatttctatgcgaaagacttgcatgagccgatctttgaaaacggcgttttatgctatgataatcccgaaattaccgacatccagcaatacgtgcaggataacctcaaacttctgtgggaggaatacaaacggatcagcaagccggaagaatatccggtcgatttaagcgaagactgctggagcaacaagatgcagcggattcatgaaatcaaaagcgagctgaaacgggaacttgaatagaagacaaagcggcctttcctttctctggaaaggcctttttgttgtgataatatttttcacatttagacaaatttcgtcaagttatttgatatacttatgttcgaaggccgcatctaagggggtaaatgaatgaaggtgtttgttgcgagacagcctatcttcaacagaaacgaacaggttgttgcttatgaacttctttaccgggagagcgaagagaaccgttattcggccgctgacggagataaagctacgacggatctcattattaacagctttatcaacatcggaatcgaaaagctgactgaggggaaacgctgctttgtgaattttacagaaagcctgatgttttcagatctccctacctcctttgatcctgaccagcttattatcgaaattcttgaggacataccgatcactccggcactcatctcaagatgcagacagctgaagaaattaggatatacattagcacttgatgatttttacgccatcaatccggaaaatgaagagttagtggaacagctgatgaaatatattgatattttaaaaatcgactttttgcaatcctcgcgtctggagcgcaaaaaaatcattcagacgtacagctgtaaaagtctgatttatttagcggagaaagtggagacgagaaaagattataaacaggcggccatagacggctttcacctgtttcaaggatattttttcagtgaaccgcgtgtcatcagcggaaatgatctgacgtttcattttcattcttactaccagcttttaagcgaattaaacaatgaccagcccaatatacagcgcgtgacggaatacatagagcgggacgtcagcttatcgtatcagattctgcgttttttaaacggatcgcaaacaaggctgaaaaaaaagatagacagcatccagcaggccatcatgatgctcgggctgaatgagattaagcgcttgatttacattctttcattcagagatttaacggcgaaaagccactcaagccaaaaagaaatcattaagatttccttaatcagggccaagctgtgcgaactgctggcgaaaagaaccggaagaccccagccctcttcttacatgctgatcggcatgttttcgctcatcgatacgcttctccacagggagctggaggatatcatcaaagaactgcctttaatcgatgaagtcggacaggcgctgctcggttatgaaaacgattattataagatgctcgcgcttgtcaaagccattgaatgcaacaactgggactgtgacgagtgggggaaagaactgaacaaagaagaagcgtatgactgttacttacaggcgatcgaatggtgccggcagctgatcgtggattgagccgctttaagccgaccacctgagggcgatgataaaccggctttgctctctgaccagactgacacggatgccgtcgggattatacgtcacgtcaaagtcatttttgatgccggtctgcttaatgagccgcttgaccgctgcggtgtcagatgattgcgctgcggtgaggatgcggcgtgcaagctcttttgacgccgtcagccgcgcaaggagcaggcgcgcatcctccagcatgcccgcagcttcatttgcggacgctgtcaaaatatctgcgtgaaccggggcactgggggctggatgccggtatggcgcggcgaaaacagggcagcatggatacacataatgcatacggcggcctccttcctgagaaaacattcgttatacatgagtataggcggcgtgataatgagttatgacatgcaaaaagaccacaatgcgggggttgcggtcttttcggtgtttgtcggtggttatgcgacgctgttcgcccattctgttttgaaattgcgacggcagggactatagtccttgccggtttgtcggaaaaccgttaaaaaaacagcagaaccgccagattggtctgcttcatcctaaacgtctgcctttatggtagttatatagtcctgttcgctaaatgctccattcgggactatgggattaccccggtttgcggtgtcacgcagatacttttacacatacttttcggtgaaaaatcccgcaaaaacgtttacactattagtaacagatcaaatacctaggactcgttcaccatacacaattcattgatctttcaaaaaaaggagtgtggaaacggtggaaaacaaattagaagaagtaaagcaattattattccgacttgaaaatgatatcagagaaacaaccgactcattacgaaacattaacaaaagcattgatcagctcgataaattctcatatgcaatgaaaatttcttaaaaagacttggaaacaagtcttttttttgtgcattttttatccatttcatggataaagtattatacgattgttaaaaaacgaaaaacctgctgtctttcatcacctgcatttagtaaaatagaatgggagggtgaagacaattattgagcaaatgtgtttagatgccgaaacgattaaagagaagatgaaggggattgtaaatgataatctttacaattcagatttgatcagtctgctatgctcttttattgaaaccaaagaatccttcctttttggaaacctggcatatcagcattacatagcatttcaaggagaaaatctcaaagaaatagagatgttggctgcaggaattgaattgttaatcttatcatttgatattttagatgatcatgaagatgaggacaatggaagtgctctttggatgaaaatagatcgctcagtatcgttaaatgcctcaactactctctatacagttagtatacagttcattaattctctttgtacagtttctgacttttctcggttggctttaaattatgcattagaggccatgcaagggcagcatgatgatctaaagaattcggctgaaacggaagaagaatgtctcgcaatgataaaacataaatcaggttcacttattgcgatgccatgtgttttaggaactatgcttgcgtgtggagagtataacaaaactgttgagaattattcctattttatggggattgtgaaacaaatagagaatgattatcacgggctgtttaatagtgaacgcagtgatattaacaaaaaaagaaataatttagttttattatacttaaaacgaaaatttaatccgatgtcagtatcaatcctcaatataatgaattcaaacagggagtatcaattattgctatctgatataaactcatttaaacaaaaactttgggaggccggagtgactcaatatgtttcggttatgatcagagtatacgaggataaaataatgactgaattaaacaaactcaatattaaacttgaatttttcaactataaatcattgaatgagggcgcaccattatgaaccaagacatcgtaaattttttaatgagaaatccagaggttgtggaaaagctaggaaggggagaagtgagcttaataagtattcctgactcgcttattcctgatattattaaaatctttaacaataaatttaaaatagggaatgatgatcctgcttggcgtacttaaaaaacaagtgaaccatggtattttgaagaagtttttaaagtttttttcggttgccttattattgtttagtattttctattttacttttgtaatatattatactcaaaatgggataattataggtaccaatgtcgttcaagtttctaatcaagaactgaaagtcgttgatatgacaaggtcctcctatggaagattaatggggttggaaattggagacaaaattgttgaaataaatggacataaaccaaataaagaaaatatttatggctcttacctagctaaagttagacaattaaaagttgagcgtaatgataagttaattaaattagataactttgaatttatctatttagatagcccgtacagtttcttttcatatattgtaccaagtattttttatttactaagtttaatatgtattttttacatctttagagttaacttaaagaaagacagcatatcggcatatattctgatttgttttttgctatgtatatctattgcttatttaagtgccggaggagtgacaaggggttaccctataaatcgttacattaatctttatacatttttagcagtgcctgttttgtatcttaatttcctgtatcaatattttaaagaattaaacgtgaaattttcacgagggatttatattctaattttatataatttgcctttagtgaatatcatatgtgaactttttgagaaacatataaagtataatgtgattacaagccttaatctcttaacttttttatttgaaatgatggtggtttatgtatgtcttatactttatcaaataaagcatagaaaaaaagattttgcttatttgttaaaagtattattagtatctaataccattgcattcttaccttttactttattatatattgttcctcttgtgatctttgggcaatatgtatatagtgcggtaatcactgcaccttttcttttgcttataccgttagcgctggtatatcagtttgttgttaataagatatataatattgattttttgctggggcgcctgcgttattattgtttattagcggttatccctacaattggaatcgtttgggtttttgttgtgtttatgaacaaaaatagagattttaatacttttcaaatcaccttgtttgtttttctgattatgctttctgttttttattttaaagaagtgttggactataagttccgcttaaagcgtttctcagaaaagtataattatcaagacagtatttttaaatacacacaattgattaaaagtgtgtcagtcttgaatcaagttttcacacatcttaaagcgacgattttagatgttttgccagtaagcaaagcttatatatttgaaattagttctggcggagaaattgtgtattttgacaaacaaagtacagaaccaaattggcatccctataaagacaaatttgaaaaggttaattcggaaatcggcaaaatcattgagattaatcaagggttcctcatgaaaattggcgagagaggaacaagttcttatgttttgctttgtttatcaagcataaatacgccgaaacttacaatggatgagacttcatggctgaagacgttatcattttataccagtgtatcgatggaaaacgttttgcaaattgaggaacttatggatcaccttcaaaacctaaaacaacaaggctcaaacccagtctggctcaaaaagctgatgtttacgatcgaggaaaagcagcgttcggatttggcccgtgatctgcatgattcagtgctgcaggacttgatttctttgaagcgccagtgtgagctgtttctggccgattttaagaaagaggagccttgccagttagaggtgcaggacaagcttcatcagatgaatgagcagatgtcggatgtcattttgatgacccgggagacgtgccatgagcttcgtcctcagctgctgtatgatttgggtctggtcaaggcagtatccaagcttgccgcacagcagcaggagcgtgcgccgtttcatatccgtctgaatacgggccggtttacggcggcgctggatttggatacgcagctgaatttgtaccgcatcattcaggaatttctttcgaacgccatgaagcattcacaggcgaatgaggtgctgattatgctgatcagcattcaaaataaagtgattctgcattatgaagacgacggtgtcggctgcaatcaggaagaaggcgggcagtcgatgagcatggggctttcgggtattaaggagcgcgtccgtgcgcttgacggacggatgaaaatcgacacaagtgaaggaaacggttttaaagcggatattgaaatggaattgtaaccaatttatcaccaaatcgacttggcagaagccaagtctttttaataaaatggaaatgagtgagtaaaagggaggaaaccatgaaaaagatactagtgattgatgatcatccggctgtcatggagggcaccaagacgattctggaaacggacacgaatctttctgtcgattgcctcagtcctgatgccagtgaacaattcgttctccggcatgatttttcagcttacgatctcatattaatggatttaaatctgggtgatgacatcagcggcatagagctttccaagaaaatcttaaaagagaatcctctctgtaaaatcattgtctacacaggctatgaggttgaagattattttgaagaatccatccgcgcgggcctgcatggcgccatcagcaaaaccgaatctaaagagaaaatcatgcaatacatatatcacgtgctcaacggacagattttagttgatttctcctatttcaaacagctgatgacccagcaaaaaacaaaaacgtcttcttcccctcaaagtgagcaggatcggttaaccccgagagagcgccatattctccaagaggtcgaaaaaggtttgaccaatcaggaaatcgcagatgcgcttcacttaagcaagcggtcgattgaatacagcctgacatccatttttaacaagctgaatgtcggctcccgcactgaagcggtgctgatcgccaagtcagataacgtactataaatcttgaagggagaatgacctatgaatctgaacaatacattgctcggcgcactcggtattgaaatcactgaaaacacgccggagagatgcgtggcggtgatgcctgtggataagaggacggtgcagcctttcggatatctgcatgggggcgcgtcagcagcgctggcggagactgttgcaagtgtgggggcccagcattttatcgaccggtcgaaacaggcgtgtgtcgggcttgagattaatgccaatcatttaaaatccgtgaaagagggcgggacggtcacggcaatagcagaacccgttcacacgggcagagcgaccattgtgtacgggattaacattttcgatgaacgggaaaggctgatctgtgtttcccgctgcacgctggctgttataacaaaataaacaaacagccggaaccctgaatcgtccggctgtttgtttttacaaatatgaatcttcttttcgtttgatcacaaagtttctgatccctttgtaatcatcctgaacgcttcttttatcaagcgccgctcccgaattgtacgcggccctgcatatgaggtgcgctccgaccggcgccgtcagcaggataaaaatgatgccgagcagtatttttacagaaatttctccggtcagcatccacaagtagcctaacaccccgagcaataccaaattaacgccgagtgtcgagccttttgaagaggcgtgggcgcgcgtatacacatcaggaagcctgagtgtgccgaaagacgcgaccaggcagatcagcgatcccatcagaatacaaatgccgacggcccatttaacgatttcgatcattttcgataatctctcctttctccaaaaacttagcgaaggcaatcgtgccgataaacgataaaatgccgagcagcagaatgatgtccaaaaaggccgatgtgtttaagagaatggatacaagcgcggtcatggcaatcagattaatgccgattccatcaagcgcgacaacccggtccggtatcgtaggccctttcatgacgcgaatgacgtacagaagagtcgaaaccgccataatgccgagtgataattgcagaataaacgtaaacatcagcggctcacctcctgaatggctttctcaaaagagacgcggatgtcatgaatcgctttctccgcatcttcaatgtccatggcgtgtatatagagaatcgaccggtcatcggagatatccatcacaagcgtacccggtgttaaagtgattaacagcgagagcagcgtgatctcccaatcctccgtcaattccgtcttaaacgcgaaaatgcccgggcggatgttcagtttcggcgatataacggttttcagcacgctgacattggccaaatataattcctttataaagatcagcgccagtttgatgactgaccatattttccaaatgtaaaacggccgcgagaagaagcgccggaaaaaaaacagcgccgccaagcccgcgataaatccggtcataaaacccgccgcgctgaggctgtttgtgagaaacatccagcaaacagcgagaagaacatttaataatagttgaaaagccatgccatctactccttcaaaacagcttcaatgtatttttccggattcagcagattctcagccgtctgattgacatacggtgaaacccattcggttccgagcccgaacagaagcgacaaaaggagaaaagcggctgccggataaagaagtccttttgcggaacgtccgcctgcgcccggaatttctttttcttccccccaaaaagccgtcgtaaaaaccttcagcacggaatagagcacaagcaggcttgataagagaatcaatacggaaaacaatgtttcccccttatcgaacccgccttccgcgatcttcagcttgcccacaaatccgctgaacggcgggatgccggccaaagatatggctgagataaagaacatccatcctaaaacgggataacgggtgatcagtccgcccattttatgcaggctggcagtgcctgtcaatgcgataagcgtgccggcaagcataaacagcgctcctttaatcagcatatcgtgaatcaagtaataaaccgctccttgaatggaggccggcgtgttcatggcaatgccgaacaaaatcacgccgacggctgtaataatattgtagatgacgattttcatgacatccgaaaaggcgatagatccgattacgccgaatagcaccgtcagcatcgcaagccacatcatcaattggtgggtaaagcccgtatcgtgaataaaaatcagggtgaatactcttaaaatggcgtacaggccgactttcgtcaaaagagacccgaataaagccgaaatcgcagccggcggggcataataagagcccggcatccagaaatacagcgggaatatcccgccctttaaaccgaaaacgacgagaagaaggacgccgatcacggtgatcagcccggtctggcccgattcgcttatttttacgcttagatcagccatattcagcgtgcccgtcaccgcgtataagtaaccgacgccgatgacaaaaaacgcggatgacacaatgttaaacacgatatacttcaatgattctcttaattgaattttcgttccgccaagcacgatcagcatgtaggacgcgataagcagaagctcaaaaaagacgtacatgttgaacaggtcacccgtcaaaaacgctccgcttacgccggccagaagaaactgcacccctgaataatagaaagcgcgctcccttttttctccgatggagcggaaggagtacagaatgacgagcagcccgatgacggcggttgtcaaaacaagcagtgcggcgagctgatccgcggcgagcacaatgccgtacggcgctttccagccgccgagtgtcagcgtctgaatcccgtgtgtgaaaaccgtctgaacgagagcggcgctgatgacgatggagacacaggaagcggcagtgctgaatatccgcatcagcagcacgcgcctgttcataaaaatcagcagcactgcggcaagcagcggcaccagaataggcaatatcacaaagttattcatgttgatcatttcccctcattcgatccatatcgtccgatttcagttcctgataggcgcgaaacgccatcacaagcaaaaaggacgtgacgccgaacgaaataacgatcgccgtcagtatgagtgcctgcggcagcggatcgacaaacgccgtgctttttccgcccagtatgggaggagcgccttttttcagtccgcccatggtcagaagcagcaaatggacgccgtggcttaaaagcgcggtgccgataatcacgcgcagcagacttttagaaagcagcaggtaggttgccgccataaacaaaataccggcaatgacagacattaagatttccactattcttcctctccaatcgtttgaataatggtcatcgtcacgccgacaacaacgagatacacacctaaatcaaacaaagtggccgtcgcaagctccgtattcccaagcaccgggagatgaaaatggccgaatgtatgggtgagaaagggtgctccgaataagaacgaacctgcacccgttgcaatcgcgataagcagacccgcgcccgccacataaataaaattgacgggcaaaatcgatttgacggtttttaaatcaaaggctaaaagcaacagcacgatggccgaagacgtaatcagtccgccgacaaatcctccgccgggagcgttatgccccgataaaaataaatagaaagagaaaagcagaatgataaaagatacaagcttcgttgccgtctgaaggatgatgtcgtttgttttttgctgtctcaacgctcttctccctcctcttttactttcgttctgatcatgccgtaaatcccgagtgcggcaatcgacagcaccgtgatttcaaacatcgtatcaaatcccctgaaatcaacgaggatgacgttgacgatattgtttcctcccccgagcttgtggctgtaagcggtgaaaaaggaggagatgctgtcttttgttttttcgctggaagacgcgattccgagcattgtcacgatgacgccgacaccgagagaaatgataaaattcgtcatccggaatgttcttgtcttctttttccgccgcattttcggcagatggtaaaaacaaagaagaaacaaggcgacggatatcgtctcaatgacgagctgcgtgagcgccagatcgggcgctctgaaaatcacgaaaaacagcgcgagtgtgtacccgacaacaccgagtgagataatggccgtcagccgcgatttggcgaacacagtcgcaatcgttgcgctcaccataacgagggacagcacgatttcatacaggccgatttcagccatgcctttcgctgtcatggaaaagccgcctttcatcacgaacgccgctccgatgagaatgataaacgccgcaaaaatatacagcagataatcccgcaaaaatccggtcatataagatgacgtcagctggtaagatcttttttccatactgcccctcaccgcatcgtaaagcttgttcaacgtcagttttttcggaaacagaccgtacagccgctcccatttagacagcgttacgtaaccgatcgtgccgacaatgataatgccgagggtcatcattagctcagccgtcaccccgtgccactgggaaatatgaacatgaaatgtatctccgccggttaacagagccggataaatggagttcatcgccggttcaatcaggctgtaagacaaaacgttcggtgcaaaaaacagactgacggcgcaagcggcaagaatgaccggcgaaatcagcatgccgagcggtgcttcatgcggcgtcttttcaagctgatcaggtttgcgcgcgccgctgaacgttctgaaaaacagcttcatgctgtagatgaaagtgaagacgctcccgatccatgcgagaacggggaacagcacgccccacgtatcaaggctgaaaatatctgcatgagcaatccgcagcatacttgtaaagaacatttctttacttaaaaagccgttaaacggagggaggcccgccatggaaaacgttccgatcagtgaaacggtgaacgttaccggcataagcgccatcaggccgccgagcctgcggatgtcccgtgttcccgtttcatggtcgataatgccgaccgccataaataaacttcctttaaaagtagcatggttaattaagtgaaacacagccgcggtgacagccgccgtaaaatactctgaatgctggtaatgaagcgcggcggctcctgcgccgagcatcgatacaatcataccgagctgactgactgtggaaaatgccagaatcgcttttaaatcggtttgtttaatcgcattgaaggaagcccataccatcgtgatcagaccgactgaggcaaccgtccaaaaccagacgggtgaaaatgcaaaaaccggactgaatctggcaatcacataaatgcccgctttcaccattgtagccgagtgcagataggcgctgacaggagtcggcgcctccatggcatcaggcagccagatataaaacggaaactgcgctgatttcgtaaaggcccccaataacaggagaaccatcgccggaataaagaatggatggcctgcgataatatgcacctggttgaccatttccctgatactgaaagaatccgtcatcagatacagcaggataaagccgccgagcatgcacagcccgccgccgacggtaatcaacagtgacttttccgccccgtagcgtgatttcttccgcttatgccaatacccgattaataagaaggatgacaggcttgtcagctcccagaacatataaagaacgataacgttatcgacgagcacaacgccgagcatcgcgcccataaacatcagcaggtacacataaaaggggccgagcttttctttgtccttcgataagtaaaaaatactgtaaagcgtcaccaaagagccgatgcccgtaatcaataaagcgaataacagcccgagtccgtcaatataaacggtatagttaataccgagggacggaatccattcggccgcataccggacggtttccccagccattgtgacagggagcttgctgataaagtaaacaaacagcacaacgggcactatcagcacaaaccagcctgtatggacttgttttacccgtttataaagaaagggaacgataaatgcaaataaaaaaggcgccaaaatcgcgaaatgtaacagctgcaacagaagacctcctttgcttgttttttcatcaagcaactgctttatgtaagagtgaatcaatcaattcacggtcataggacccagtacaaattatatcgcacttttttttaccctgctacggcataatgtattcctttctgtgtttttgtggtcttttgaacccaaaataaatttatcaaatatcctgatctttgtatatacatttatctttcagatcaagcttttaaaaaaggagctggtcagatgaagagaaaggcggcggcctgtattggaatattttgttctattatcgcaggaacattcatagcggaagatttctgcaaagggaggcagcagacggaggcagataattgggagcgtttttttctcggtgcggaatacgcggaagacaagctgagtgcggcggaatcaatgcaaacgccgtttcagccgcgtgagtatatcagaatcgtttatagatgaaaagagttccggcaccggggcgcggaactctttttttgtggcaatcagcgttttcctttaatgtaagggatgccgttggccttaggcgcatccgcgcggccgatgaagccggcaagcgcgagaatggtcagaatgtaaggagccatcagcatgtatacattcggaatgtctttgaacaggggcaaaagcgagccgataatgctcaaactctgtgcgaacccgaagaacagcgcagccccgagcgcgccgatcggatgccatttgccgaaaaccagtgcggcgagagcgataaagccttgcccggaaatggtggagtgcgtgaaatcaagtgcgatcgtggaagcatatacaccgccgccgagcccgccgaacagtccgctgatcatgacgccgatatagcgcatgccgaacacgttgattcccatcgtatcggccgccatcggatgttccccgacagaacggatgcggaggccgaacggcgttttgaataaaataaaccaggaaacaaaggccagtacgatggctaaaatcgacgtataatatacgtcagaaaagaaaatctttcctaaaaccggaatatcgcttaacccgggaatgttcgttttgtaaaagggctccgggattttatcagtctgcgcctttccgtagatcagcttgacgataaacagtgtcgctcctaacgcgagcatattgatcgccacaccggttaccgtctgatcggcgcggaaagaaaccgcggcggccgcgtggatcagtgagaacagtccgccggcaatcatagccgcagccaaggcgagccacggagcggcggcgccaagctcgcgtccgaaaaataagttgaacatgacgcttgtaaaggcgccgataatcatcagtccttcaagaccgatgttgacaacccccgatctttcagaaaatacgccgccgagagcggttaaaataagcggagccgcatatacgagtgttgccgggacaataatggataaaatctgcaggaagtccacttacttcgccccctttttcttcaatttatcaaggatgagacggatggcgtagcttgatgccacaaacaaaataataatggcgatgacgatgtcaacgacttcagaaggcacgccggattcaatcggcatatttaatgccccgactttaaggccgccgagaagacatgccgccagaatcacgccgattgccgtgctgccgccgagaagcgcaaccgcaatgccgtcgaagccgacgccggtaaaggcgcccttaaccgccgcgtattgaaaggttccgagtccttccatcgcgccggcaagccctgcgaaggcgccggaaatcatcatggcgtacatcatattttttctgacgctcattccggcgtattgtgcggcgtgctggttaaagccgacagcccggaattcaaatccgctttttgttttatgaataataaaccacatgaggactgccgcaaacagagcgatcagaatgccccagtgaaggcgggagtaatctgtcagctgctctaaaaacggcgagcggagcgacgcgctttcatgaattttgtctgttttgtcccggtggtccgtcatgacatcggaaatgagataattggttaaatgaagagcgatataattcatcatgatcgtgacaatcacttcgtggacaaaaaaacgggcttttaaaaatccgggaatcaggccccaaatgccgcccgcagccgcagcagccaataacgaaagcggaaggtggatgtaagcgggggcgtcaaaggaagcgccgacccacaccgcggcggtccagccgacaaggagctgtccttcaaccccgatattaaacaggccggtccgaaatgcgaatgccacggccaatccggacaaaatatatggcgtaatctgccggatcgattccccgatgtaatacacttcaccgaaaatgccgctccaaagagccgaatacccgcttacgacattgtagccgctggcgagcatgatgaccgcacccgcagctaacccaaggatgatcgcaatcagcggcacagccagatgagaaagtcgattaatcatgtgttttccccgcctccatttgcttacttcccgccattaaaagtccgagctcctgctcgtttgtttcaagcggattgacgtttgcgatgatgctgccttcaaagatgacggcgatgcgatcgctgagattcattatttcatcaagttcaaaagataacagaagcaccgctttaccggcgtcacgctgctcaatgagctttttatggacgaattcaatcgcgccgacatcgagtccccgcgtcggctgggccgcaattaaaagatcaggatttctgtccacttcccggccgataatggccttttgctgattccctccggagagagcgcgcgcaggcgtatattcatcaggtgttctgacatcgtattcttcaatcaggcttcgcgctttgtcataaatcgtgtgtttatttaatatgccgaaagaagagtagggcttttggtaataactttgcagcacgatattttctccgatcggaaaatcaaggacgagcccgtgtttatgcctgtcctgcggaatatgcccgatgccggcttcagtgactttcctgggcggcatgttttgcagctgtttgccgtttaacgtgatcgtgccggcattcgtttttctgaggcctgtaatggcttcaattaattcagactggccgtttccgtcaacgcccgcaatgccgacgatttcaccggctctgacagagagggagagctgcttgaccgcctcaacgccgcgcgcgtccttcaccgttacatcagaaagcgaaagcacttcttgtttcggatcggccggctttttatccgtcttgaatgacacttcgcgtccgaccataaggcttgccagttcatcttgatccgtatgtgcgacatcgagtgttgtaatgccttttcctttccggatgatggtgacacggtcgcagacttccataatttcttttaatttgtgggtgatgaggataattgattttccttcattgacaagatttttcataatctgaatcagttcttgaatttcgtgcggagtcagcaccgcggtcggctcgtcaaaaatgagaatgtcggcgccccggtagagggtctttaatatttccgcccgctgctgcataccgacggaaatatcggcaactttggcttcaggatcaatgtgcaggccgtaacggtcggaaatatcgcgcacgtcccggtcggcgcgctgtctgtcaattcggccgaatgttttcggctcttttccgagaatgatattttctgagacggtaaaggtatccacaagcataaaatgctggtgcaccatcccgatgccgagatcgttggctttgttcgggctgttgatgtgaacgcgttcgccccgcacccggatctcgcctttttccggctgatacagaccgaataaaacgttcataagtgtcgattttccggcgccgttttcaccgagaagggcgtgtatttcgccttttttcacttgaagcgtgacgtcatcattggcgacgattccgggaaactccttgcgtatattaagcatttcaatgatataatccaccgatttgacgctccttttcagagatactttgatgagaaagagcttggcaaaagaaaagctgcaagagatgcagcttttccttcaccgctcttttcaaaaaagagaggggataagcacggaagtctccttatcccctggttcttactcagccttgaaggatttcaattctttttcagttgaagggatctcgagtccgtccgcgattttcttcttccaatcgtctgttgctttgatgacatcgtcagaaaggttctccttgtgatccgagatgccgactgcatcttgcgccaaaccgtatgttaatgttttgccgcccgggaatttcccgtcactcgcttttttcgttaagtcctctacggctgtatccacttttttgaccattgatgtgagagtgacattgtcttttgtgcctttgacttgaccttccgcgtactggtctttatcaacaccgataacccatacgttccgcttcggatcttcttttttcagatttttcgcttctgtgaagacgcccgttcccgttgcgccggccgcgtgataaatgacgtcaacgcctgatttgtacatactttcagccgtcgccttgccgacatcggctttgtcaaatccgcccgcatatttcacttcgacggtcgctttcggatttgcggcttgtacacccgcgcggaagccgatttcgaattttttgatcaattcagactccattccgcccacgaatccgacttttcccgttttgctcgatagcgcagcggccgctcccacgaggaatgaaccttcctgctccttaaatgtaaggctcgccacgttgtcttttttgacaacggcgtcaatgatcgcaaaatttgtgtctttgcgctgatcggcgatttcgctgatggaatcctgcatcagataaccgacgccgtaaatcaggtcaaagtgctcccgcgctaatttatttaagttcgttgtataatctgcatctgattttgattgaagatagtcaaaaccgcttttgccttttgtaagcccgttgtcttttccgaatgcctggatgccttcccaggcggactggttaaatgatttgtcatcgacaccgccgatatccgttaccatgccgacggtaaagtttttgctgccggagccgtttgctttgtcacttgaaccgcatgcgcttaatatggttccggccgccgcgatgagcgccatcgccattccgattttgcgttttttcaaagatataacccccctgtaaaatatggctgtgccgttcaattcagacttgagtccccgtaccggatgcagaatcgaaaaaactttctgataatagtgatgagacgtctctctttttcccgccttgagcggctgtctcttccgagttcgggacttatgacttatctgaaaagatctgctaaccaatcataatttatcattttacccgccataaataaatagaaatttgcttatttttaaaaaaatatcaattttatgaatcggcttcctcatctggataaaacagaggaggatcagccaggtcattatccttatatagcatacaaaaaaggaatctcaagccttttgtcatgggatatgacagtaaaaaagcaccgttcacagcggaacggcgctttttgacattataaatattgtttgatgctgctgacattgcctgtgttgatatggtattgaaagacgggccttccgattgtgccgtacgccatctctacattcagcacttgaatgtcttccagaaatttaaggtacttccgaatggagacttgtgagatttcagtatgcttggcgagatcttccgtagtaaaagaactgtcgccgaaagactcaatgctcgcccagatgagtttaagcgtgctttttgtcaatcccttcggaaggtgaaccttttccgccgcttctttcttttgaaaaagctcggcatccaattctttctgtgtcatgcttctgtgtgattgataaactttctgcttgcgtctgtagtcggaaagagcggtttgaaagcggtcaaattcaaatggtttgattaaataatcgacggcgccgtaccgaagcgtttttttgatgacgtccagctcgcttgcggccgaaatgacgatgacatcaaccgattcattctgcttgcggatttccgttaaaagctcaagcccgttttttcccggcatgtaaatgtcaagaaggatgagatcgatatgatgctcgctcagcacgtgcagcgcgctttgaaaggatgatgcgatccctttcagctgaaatccttcaatctggctgagatagcgcttatttaattcacccaccatggggtcgtcttcaactatgagtacattaatcatcattttcctccttcggttcatacggaatgcgaagactgaaagtcgttccttcattcttttcacttgtcacaatcatatggccttttaaattttctgttgcctgctgggtgaaatagaggccgaacccccggtttgtccctttcgtggaataaccttgttcaaaaatacgggcttggtctgccgcagacattccggctcccgtgtccgtaatctctatatcaagctggcgatcctgaaaccgcatcgagcacgtaatgttttttttcggcatctgcgccaccgcgtcgagcgcgttgtttaacagatttccgataatcgtaatgagctcatggatgacggccggatccgccgcattcgggatcaggctgccgagctgaatgtccagatcagcgccctgctcgcgtatgtagctttgttttcctagaagaaaccctgcgagaaccggacttttgacatcacttataatctcgcttgtttccgtcttctgctgaatggcaatgtctttaatataagtgccgagatcatcgtattcttttaactggacaagccctaaaatgacatgaagcttattcatgaattcatgagactgggctcttaatgcgtttgcatacattttaacaccggacagctgttctgctaaatgtttgacctccgttttgtccctgaacgtggcgatcgctccgacggtttgtcctttcagatgaatcggaacctcattaaagaccagctcaagcccgttaatgcggatatctctgtcctgaagcggttttttcgtttcaatcacctgtttcagccggcttttcgggagaatatcgttcacatcttgatcgaccggattagtcggaatacccattttaataaaaagccgtttcgcttccgcattggcgagcttgatttttccccgtgcgtcaaccgccagaatgccttccttcgttgattcgagcatggcgctccgctcttccaggagggtggcgatttcataaggctcaagaccgtacataatgtttttgacggtgcgggcgacaatgacggctccgatgacgccgacaaaaatacttacgcagatgatgaaataaagcggtctcaaactgtggctgacgacatcctgtattttgttaagcgaaattccgaccgaaacgacgcccacttgttttttatcttttccatagatcggtacgaaagctctcatggattttccgagcgttcccgctgatgtgctcgttttgatatggccgtgcatcgccggctgttcgtctccgccggtgaatttcttcccgattttatttgcgtcggggtgggtgaggcggatgctgttcatatccatcaccacgacaaattcggttcctgtcgtatgctggacatccagtgtataatttcggagctctttcagcccttttcttgtttgcaatgcctgcgcgacactcggtgtttccgcgaccagctttgcggtgcgcagcgcggttgtccgttcttcttctttcacgcggtctgcggtctggacgctgatcgtgaaaaaggtgatacaaagtgcgataaggacgacaatacagacgaatatcgttaatcgggtttgcaattttaatgtttttttcataacagccttccttacgtttatcattcccgcgttctactttactccgaaaaagccggtttgtgaagatcaggcccttatttcgtaaaagtgaggaaaaatggaattttttatcttgtcaatgtgttttaagtcctccataataagtgaggtagattacagaaagggactttttatatgaaaaatacttattggacgggttattttccgctcgttgcgattctgctttttagttcgtcattatccatttctacctcgctttatgtcatgaagatacttcagacgctcggcatgtatcaggggatgctggattatttctctgagaaagggatcagactggcgctttttgcagcgttcgcccttgtgtattttatgcttttttcggctttgaagctgattgcaaacacagtgacagagctgtctcttttgtttttcacaaatgaccctgagggggacaatctgaaaaaaatcagattaggctctttaatttatgtaggcggaggaattctttcctttgcgctcgtgcagaatggtttttggattgcggcgttatttgccgttgttacgctcgtttatttgatattcatggtgtacagaatctattcgacactctctatcgtttcgctgatcggttttatattgcttgagattctgttttggtttacttttgttatcggtattttgtacatctttatcaagctttataatagcataatggctagcttacctgtgtaagctagccatttttgttaagacagaaatctatttttgatctcaggggaggggagcatgcatgcttccctttttccgaaccatttgtaacggcgccgggcgatgaaagaataggctctgtccctgagggggcggggcactgcgaaaaaaaccgctgacagccgccaggctccgcggagatgacgggaaacctttaacacggctgcggattttttgtatatccgcccgttctcgataaaaatcatgctgtcaaattgttctgtcggaagtccttctgatgccaaaagctcccgggcggtatctgattgcaatgaagcaaatgagattttgccggccggatcgcgtttaatgatgaattgaacggcgccgttgcataagttgcagacgccgtcaaacaaaagcacgcggtccggaagctgagctggtttcaaagcggatcccctccgttatctttaataagctgcctggagcgtgtttttccagatcgaaagctgagggcttgcgtcatgaaggtattcgacgcttgacggtgtatccttgccgacccatacccccatcgtataagcgtccgtcaggccgacaaaccacatatcgtgatagtcatttgacgtacctgattttccgccgacgtacggagctttaaagttcgctttttttcctgtaccgcttttgacgacggctttcatcatttctttgatctgcatgttggtccgcacgctgaatacctgcgtcggctcatctttccattttaatatcgtttttccttttaaatcagtcacttttgtaatcgcgtgactcggcgtataaacgccgctgttgccgaacgtggtgtacgcattggtcatttcaagcggcgtcatgccgtttgtaaaaccgccaagcgccgcaggcagacggtaatccgcgctgaccagcttcgcgaaatgaaacggttcaaggtagctgaacgccttattgacgccgacgcggtccatgattctgatggccggtgtgttgtacgagtatttaaacgccgtttccagcgtgaccgtaccgtacgtgcggttattgtagttctgcgggcagtaatccgcactgcagaatttgcttgcgtcaatcttgctgtgtggcgttgcgccggtcttttcaatgtaaggtccgtaatcaagcagcggcttaatggaagaaccgggctgtctgtatgcttgataggcgcggttgaaatcatatttatgataatctttcccgcctgaaagcgcgataatctgatgtgtctgatgattaatcacggccgctccgccctggacgcctgcatacggcagattttgattcacttgggcgacgacctggttttgcatatacggattcagcgccgtataaatcttcacgccgtcttttaacaatgtgctgactctgtttgaaagctcactctgtattttttgtttcgcctttccggaagctttttcaagacgtttgtcatagccttcggatgatgaaacaagctgtgtgaattcatcatttacataggaaacatagtcaggatatttatttgttttttcgtttatatcaagcttgatcttttccttttcggcttttttcagctgtttcccggatataacgcctgctttttttaatccgttaagcaatctgacttgtcgttttttcgtataatcaaaatgcttgagaggatcatataatgtagggttattagggatggcgcagataaaggccatctctcccaaagtgagagatttcagcggcttgctgaaataaaattgtgccgccgaaccgacaccgtatacgccgttattaaaataaatcgtatttaagtagccttctaaaatctcatctttgctgtattttttctcaagctgataggaataggccagctccgtcagttttcggctgaaggtgcgttcatggcttaaatacacattccttgccagctgctgggtgatggtgctggcgccctgatcaattttatgatctttgaaattggaggcggccgccctgaccatccccataaagtcaaaccctttatgctcataaaaatgacggtcttcagaggttaaaaacagctgttttacctcattcggtattttattaaagggcacgatcacgcggttctcatgatcgctgacaatctcagaaacaaggcttccgtccctgtcatacatgtaactgttttgaaccaggttgatcgcttttaaatcaatatgtttatcgagcacctgatcaaaaggcttgatttgttttacctctttgccggaagcaataactgtaaatgcacacaacgggataatgccgagcagcaaaatccatccgattattttacgtaccatggtcactctcttttctcctgatttctagccatatcgtatcattcttttaagaatacgagaaggttaaatttagaagaaatcatgatcgctgttggtcagcccgcatttgacgctgtatccttttgcagatgtcccgccagccataaaagccccgcgcctattaaaaagagaaaggcggtgacgtagaaagcagccgaaatggaaaaaccgctcgagaccgcacctccgagcagagggccgagcacatttccgagaaaacgaaagctgacgttatagccgagcacctctccctggatgctgcccggcgccctgacgcggatcgcggccgtaatgcaggggagcgtgccgcccatgaccatgccgaacagaaatctgaagactaacagaatggagagggaggaggcgagcgcctgcggaatgaaaaacaccgctgaggcaatcaaaagcacgattaagatccggctgtggccgaagcggtcgccgaagtccccccatttccgggcaagcaataagcttccgagtccggtcgctgaaaacgccattccggagaaaaaagctaaattaacaggtccgtgcagttcattgacatataaagcgagcagcggctgaatactgaaattgccggtctgcacgatcatagtaagcaccatcatcgcccaaagcgcgggctggtgaaaaatataagagagcacctgttttctggagtaggttttccgcttgttttgtttctcgccgagcggctgctcattcacctgaaataaaacgagaagcacagatgcgaaaataacaaaagacgtaataaaaaatgtgtacgtaaacccgaagctgtcagcgagcagcccgcccagcatcggtccgaataaagtgcctgacacctgacccatctgcagcgtgccgagcgttttcccggcagtctctttcggcgtctgcgccgaaatcatggcaagcgatgtcggaacaaagcctgttactagacccataagcagccgcaggacaaacagctgataaacggatgtcacaaaccccatcaataaaatgctgacggcaatgccggtgcctgtaatcaagagaatttttttgtagccgcgcttatcgccgaatcttccccaaaacggggaaatcacaaacgccattaaaaacgtgacgccgaacacatacccgctccatctctgcacatacccgcccgaatgggggctgatcgtttcgatatataacgaaagaaacggaacaatcatggtcatgctggcggaaataaagaaatttgtaatccaaatgacgacgaagttcttcttacggacagaaataacatcaccttctttacttttcgtgtgtctaatcataagtatataggaatgaatccggtatttgtattttcgatgcggatataggaaaattcattatttttagaaaatgaagaaagtttcagaggggaaactgatatactatcataaaatatcatttttgatcggaggaaaggcaggtgtaaaaaaagtggatcagcgcagtctgctcattattgattttgaatttacaatgcctgacggaaaatacagcccgcaaaatttctttcccgaaattattgaagcgggaattgtcaagacggtgaatgatgaagtgactgaaacgttttcgagttatatcaaaccgaaaaaatttccgaagctgacgaaacgatgcaaaacctttctgaacatcacccaaaaagacgtggacggcggaatcacgtttaatgaattcatccgcaaattaaatgagcttgatcctgataaaaactgcacgatcgtcacctggggcaatatggatatgaaagtgttaaagcaaaattgcatgtttaaccacatcccttttccgttcaaaggagaacttcgggatctgtcccttgaatacaaaaacttcttcggtgacagaacattgaccggcctttggaaagcggcagaagagtatggcgataaaggaacgggcacccatcataaagcactggatgatgcgcggacgacatacaaattattcaagcttgtcgagcgggataaacaatatcttgaaaaaccgaaacctcccacgatcggtgatcgcgtcgatctgactgaactgtttcgccgggccacataaaaaaacccaatcatgccgactgggtcaagttcttttaaaatagtcacgctctaacgcggccaagttgtcgagcgaacgttccgcccattctgagccgtccgctgtaagctgatctttcagccgggcagacgccgcttgtaaggaagccgtataatcaggcacctcgccatcaaacggtttgaccatctgatgcggtatgtttgtctgttccccgaatgcaagcgctcttctttcatgaaaaaacggaacatccgcctgcttcggatgatgaagatctccttgagcgggatgcgtcagaacggctttaattttcactaaatagtgattgggcctgacgtctgtcacttcccctatgtatgctcctgttttataaaacccttttacgattgtgccgatttcaaacgtattcatagcgttcacctctctctagttattctataaaagatcaacgcggttggctagtgaacagctgccggaagcctgactgaggccgttgtgcccgagtgctcgccgctggtgaaatagacggagccttcatgatgctgaataatcgagaatgtcacggtaagcccgagcccggtgccgttcgttttcagcgtataatacggtttgccgagtttctgcagttcttcatcggacatgccgattccgttatccgtaatctgaatgagaatcatctcttcctgtttttggacggagacctcgattcggccgttttcagagggcacggcttcaatactgtttttaatcagattaatgaaggcctgtttcagtttttttacatcgccgaacacatataaatcaggctcgctttgaacagtcacggtcaccgatttaaaatgggcataagactccattaaggaacctgtttcctttacgagcagagaaatatcaaacttttctttttcatagtcatcctgcttcgccatatcgagataattcgtaatgatcgtctgagcccggtcgagttcggacagcacaagtttctgatatccggagtgggatttgtcctgaagctgctcgccgctgaacagcagctgcacaaaacctctgacgaccgtaagcggattgcggacttcatgggcgacgcttgccgcaagctcactgacgacggccattttttctgagtgaatcagccttgcccgcatggatgcattctcatcgatgatctcaatcaaataaatgcacagcaaaagggcgctgacttgaaaaaaaacagatactgccgcctcataataaacggaagatggattttgaaaattgaaaatattggtcgcggaatagatgaagacagatgcggttaataaggcggtttcagtgcagccgatgagaagagcgaaaagcagtttcttccgctttgaaaaaaaaggccatttcgtttggagctggatagggatgatgattaaaaaaggaattaaggataagaaaaaaagaacggaaggttcaaaccatatgagctgaaaaaaaacggatgccgcccctgcggcaagtcctgcggcggtaccggaataaagcaggcagacgataatgggaatcagctgcaaaccgtaacggacggaatgaagctcctggatgggaaaagccgtacataataaggaagatgacgctgcaaatacggcgaccagcaggcggttcgctctcggcacaagcaaatcaggcttgctgagccagaagacttgataaagaaaaatagggaatagaataaaagagaagtgaagcaggtaatcctttacaatctccatttatgcgaaatcctttcgtatgtaaatatgaatctattataacatctttaccggaaaaaaaagtatatatttctctaaagcgaacgcccttatctcatctgataaaggcgttctttccgctgctaagcgagcgctgctttcattctctcaagcccttcttttacggcggcggctgaacagccgacattaagtctcataaatccttcgccgcccggtccgtattttgttcccggctctaatatgattttcccttttttgagcattctttctttgagctcggcatccgaaaatccgtattcgctgaaatccatccagatcaaataggaagcgtcaggcttcatcatgcggactttcggcaattcttttcttaaaaagtcctcagccaatttcatattcccttcaatgtaaggaatcagcgcgtcaagccaagggcctccctttgtataggccgcttcgattgctgcaaccgcaaatgtgttgaggctggaaatcccgttctgatgcaatgcggcggagaatttcgcccgcttataccgatcgggaatgataatggcggatgcctgaatgccggcaatattaaacgtcttgctcggcgcgacacaagtaacggaaatccgcgcaaactcctcagacagagaagcgaaaggcgtatgcggctttccgtacagcatcaagtcggaatgtatctcgtcagaaacgacggtgacgttatgggcggcgcacagcgatccgagcttcataagctcatcccggctccacgctctgccggacggattgtggggattacaaagaatcatcagcttgacctcagaatcgctgagctttttctcaagatcctcaaaatccatgcagtagacgccgttttcttcccgtaatgggttatgtaaaacctgccgtttgttttccttgatcatctgataaaaaggcgtatacaccggtgattgaatcaacactggatcgcccggttcggtaaaggcttgtacggccatgctgattgccgtgacaacaccgggactgaacgcgatgcttgcgggatcgggccggtagccgtgccgcgtctcaagccatgaagcgacggcttctcttgtgttttcgtcaggagacgtataaccgaatatgccgtggtcaaggcgggcttttaaggcgtcagtgaccgcttcgggagcgcggaaatccatatcggcaacccacatcggaagcgcatccgatacgccgaataacgcttccgccttgtcccatttcaccgattgtgtgccaagacggttttctcgaagatcaaagttcatgtatgtcactcctgtagtatcattattttgcacagcgtatctatgataaaatagaattgcaaactttattataagcggtgatgaaaatggaagaaagccaagcggtcatggaaatgatgaaaatcattgccaagtgggacccgtttaaatatggagaagatttttatgagacagaagccgtcgacatcgttcaggccgtctacagtgaagaccgtgccgacaagctggcagcagccattcaggatatctttgaagcttcatttgagcaaaagcttccgatcgaaggctgccaaaaggccgccgagcagcttctgttcataaaagaaagcagctcctgcaccccttaaaaaccggcggttccgccggtttttttattgaataaattcaaaaatccgctccgaaacaaactccgggcgctcttcgggtacgaggtgtcccgtatccttgagtgaatacagaatggaatccggcaggtcgtcatgaagccgttttccgactgagaccggaacgacccggtcttcttctccccagattaaaagagcggggttttgcactttcttcaaatcctcgggctttaaatcgccctccctgtgtctgataaaccttgtcatcgctttgaaaatctggcggtctgtaaatggtttttcgtaaccgtcaatcatttcctgatcaataagcgtccggtcgtgaacgacatttaacaggttgttcagcacgccgtcttttgaaagccaatacttaaggtacaggtcaaaacaagggagatgcgtcccgaatataatcgacgggtgcgagcgctttaaataccccgagctgcacaacaggacgattttagaaaaaagctcgggtctgagaagagacgcggataaggaaatctggccgcccattgaatggccgatgagtgcggcccggctgataccgagcttttccagaagtccgatcagaagcttggcgaggtttgcgtaagtatatacgaaagtccgtgacttttccgattgcccgaaaggaggcaggtcaacggcgataatatcataatggtttctgagcagcgggatcagttttctgaagctgaatgccgaagataaaaaaccgtgtacgcagacgagtgtctgtctgccgggattttcataatgctcgtaatacagctcaactccgtctatcgcggcccgtttaatcggtgaaacagcttccatgagagccttcgccgtcctttctttgttgtaatgtaaaggcttttttgattgtcagattttagctctggtttctttcgggtttttcttagcatttgtcgaaaatcgtgatataatgtcatgaagatttttgataatgcaaaggtgtgaaacgtatgaagctgaccgaaaaagaaacagaaatattagaaattttagacgaaaacagccgcgttgatgcggaaacgattgcgaaaatggcaaacattcccgctgaagaagttaaaagcatcattgaaaagcttgaaaaggaaaaagtcatcattgattatgcggcgatgatcgactggcgcaaagtcgacggtttggaaggcgtcacggcgatgattgacgtaaaagtcactccgaaacgaaatgtcggctttgatgaagtcgctgagcggatatacagattccaggaagttgaatcagtgtacctgatgtcaggggtgtatgacttatccgtcgttattcgcggcaatacgatgtcagacgtggcaagcttcgtgtctgaaaaattgtccacccttgagtctgtcgtttccacgacaacgcacttcatcctgaaaaaatataagcatgacggcaaagtctttgaaagcggagacgatgacaaaagaatcgtggtgtctccgtaaatggaaacgaagacttcttatttatctgactacgtgcagcagattaaaccgtcaggcatccgcaagttctttgatctggccgctacgatggaaggcgtcatttcactgggagtgggagagcctgactttgtgacagcctggaacgtgagggaagcgagtattctttctttagaacaggggtatacggcttatacggcaaatgcgggtctttatgaactgagagaagaaatcagccgctacttagatcagcggttcggcctgagttattcgcctgacagtgaactgatcgttactgtaggggcaagccaggcgcttgatctcgctgtccgcgccattatgaatcctggagaggaaatgttaattcccgaaccgtgttttgtcgcatatgaatcactcgtgaccctgacgggggcgaagccggtgccgattcagactgtcgctgcaaaaggtttcaaagcatccccagccgattttgaagcggccctgacggacaaaacaaaagcgctgcttctatgctcgccgtcaaatccgacaggttctgtctattcgaaagaagagcttgaatccatcgctgctttcgctgaaaaacacgacttgatcgtgcttgccgatgaaatttatgccgagctgacgtatgatgagccattcacgagcatgggggccatccgcggcatgaaggaacgcacggttctcatttccggcttctccaaagcatttgccatgacgggatggagactcggatttacggcggcgcctcccgtgatcagggatgcgatgctcaaaattcatcagcacgcgatgatgtgcgcgccttccatggcgcaatacgcggcgcttgaagggctgaaaaacggccaggaagacgtcgaaagaatgaagaaaagctatcggagacgccgaaacctgattgtggagacattgaacgaaatcggactcggctgccaccaccccggcggagcattttacgcctttccttccattcagtcgaccggcatgagttcagaagaattcgcggaacagctgctcattgaagaaaaagtagccgtcgttccggggaatgtattcggcccgagcggcgaaggctacatcagatgttcctatgcgacatccattgagcagattcaggaagcgctcgtcagaatcaaacggtttgttgaaaaaagggcataaaaaaagatacgaacccggttcgcatccaaataaaagggggggaatactagaaagccttcgtaatcatagtatacccccatttttctgtgcttaaacatgatcatgtaaaaaagttctctttgcgaaaaacaaacttgtatgatataattttaaattgcgtataatctgtatttaatttaacttaggagttgttatgaatggcagcaaaatttgaagtgggcagtgtttacactggtaaagtaacaggattacaagcgtatggtgcgtttgttgcattagatgaagaaactcaaggacttgttcacatttctgaagtcactcacggtttcgtaaaagacattaacgagcacctttcaatcggtgacgaagtacaagtaaaagtacttgcggttgacgaagaaaaaggcaaaatcagcctttctatccgtgcgactcaagcggcgcctgaaagaaaagaaagcaaaccaagaaaaccgaaagcggctcaagcttctgaagaaacatctgctccgcaaggtttcaacacattgaaagataagcttgaagagtggattgaacagtccaaccgtaaagaccttatcaaaaaataatcatcaaaaaaagcaccggatatgtatgttcggtgctttttttatgtttgtttatctgacttccggacttgccgcttcctcgcgggatgtttcttcgttcggcttaaacagcaggccgagattgatcagaccggcgatgccgacaagaccgtaaataatccgcgacagagctgatccttggccgccgaagatggctgctactaaatcaaattggaaaaatccgatcagtccccagttaatagcgccgataatcgttaatacgagacagatacgctgaataacactcatgtaaacaacctcctctatgaattcgtgaaacagttatagattgtgacaaagcaaagaatctatgcatactacattctccgctgtgtaaattacacactgtctcaagctgtacaagtgcctttcccgcgaagccgctgcctgtaaaccgtgtgatgtgccgtcaaaaaagcggattgctttacattgaatgtcatctttctgcataatataaatccaaaggaggagatgtcatgcaaaactttacatattggaatccgaccaaattgattttcggaaagggagaggtcgaaaaacttcctgaagaaatcaagccgtacggaaagaacgtactgctcgtatacgggggcggcagcattaagcgcagcggtctttatgatcaagtaaccgaactgctgaaaaaagcaggagttaccgtacatgaattggcaggcgtagagccgaatccgcgtgtctcaacggtgaacaaaggtgttgcgctctgtaaagaaaacagcatcgatttcttattggccgtcggcggcggaagtgtcattgactgcacgaaagccattgcggcgggcgctaaatatgacggcgacgcgtgggatatcgtcacgaaaaaacaccagccgaaagaagcgctgccgttcggaacagtgctgacacttgcggcaaccggttcagagatgaactccggatcagtcatcacaaactgggagacacaagagaaatacggatgggggagcccgctcgtttaccctaaattctctattctcgatccggtaaacacatttaccgttccgaaagaccacaccatttacggcatggtcgatatgatgagccatgtgtttgaacaatatttccaccacacgtcaaacacgccgtatcaggaccggatgtgtgaatcgcttctgcgcacggtgattgaaacagcgccgaagctgatcaatgatctggagaactacgagcttcgtgagacgattttatatacaggcacgatcgcattaaacggaatgctgtcaatgggcgcaagaggggattgggccacacacaacatcgagcatgcggtatcagcggtttacgatataccgcacgccggaggtttagcgattctgttcccgaactggatgagacatgtgctcaaagaaaatccggcccgctttaaacagcttgccgtccgtgtctttgatattgacgagacaggcaaatcagatgaagagatcgcacttgaaggaatcagcaagctgtctgatttctggacgagcctcggcgctccgaacagactcgctgattatgatatttctgatgagaagctggatacgattgcagataaagcgatggcaaacggagcattcggacagttcaagtcactgcagaaagaagacgtgcttgcgatactgaaagcatcattgtaataacataaagggggcggccggattggcagctcctttttttctgtgttatagtaattcccttacgatttttttggaggtcatgataaatggagaactttacgtactacaatccgacgaaactgattttcggaaaaggtcaaatcgaccaattgaaaaaagagctgaagcaatacgggaaaaacgtgctgcttgtttacggaggcggcagcattaagcgaaacggcctgtatgaccaagtaacaggcatcttaaaagaagaaggcgcaaccgttcatgagcttgcgggcgttgaaccgaacccgcgtctagaaacggtaaataaaggaattgagctgtgcagacagcatgagattgatttccttctcgcagtcggcggcggaagtgtcattgactgtacaaaagcgattgcggccggtgcgaaatatgacggcgacgcatgggacatttacagcaaaaaagtaacggcgcaggacgcgctcccgttcggcacggtgctgacgcttgcggcgacaggttctgaaatgaaccctgattccgttatcacaaattgggaaacaaacgaaaaattcgtatggggcagcaatgtcactcatccgcgtttctccattttagatcctgagaatactttcagcgttccggaaaaccaaaccgtatacggcatggtggatatgatgagccacgtatttgaacaatacttccacaatgttgaaaacacgccgcttcaggacagaatgtgttttgcggtccttcagacggtaattgaaacagcgccgaaacttttggaagaccttgagaactataagcaccgtgaaacgattttatacgcgggtacaatcgcattaaacggcacgctgcaaatgggctatttcggcgattgggcttcccatacgatggagcacgccgtatcagcggtttatgacatccctcacgcgggaggacttgcgattctgttcccgaactggatgagatacacgcttgatacaaatgtagaccgttttaaaaacctcatgctcaacatgtttgacattgatactgaaggcaaaacggataaagaaattgcgcttgaagggatcgataaattgtccgcgttctggacaagcctcggcgcaccgtcccgccttgcggattatgacatcggtgaagacaagcttgagctgatcgcagacatcgccgcaaaagaaatggaatacggcggattcggcaatttccaaaaactgaacaaagatgacgtacttgccatcttaaaggcgtcactgtaagatacattcccggccggggtgaagatgaaatagattttcaagctgcagatgcaaccgttttgggagtccctctttccagattttcattagtgcatcaagagcaagtgaaacaccccttgccatgagacaactatggaaatctcacatgatgcggatttgactccctgtttctgtacatttagcagaaaaggatcaattaactttgcgatgccgatcatttatttacacaaaatctaaatcatgaagatgaagagccttgctatacttcgaatttaaaaaaggggcgctgattcaatcagcgctccttttatgcattgtactaaggtcccgctgagcccccatatagcttcccattaagttttgataaccgggaagatgactggagattaatgcgccaaaaccttcaacatcgttgcgccaatcacgctgaagctcgcatgctacgctgaaccagttcataagctgcgcgccgccatgagccatacgcgttaatgatgcatctgctacttgcttattaaacgtccccgaagcatctgtcacaacaaacacttcgtagcctgctttaatggcagaaagcgcaggaaaagcaacgcagacgtctgttacaacccccgcgataatcagctgttttttgccagtcgcttcaatggctttaacaaagtcttcattgtcccatgcattaatttgtccgggacgggctatttttggcgcatcaggaaagagatcaacgagttcttgcatgagcggtccgttgggtccattttcaaaactcgttgttaaaataaccggtaaatcaaagaatttagccgtatcaccgagagccaatacattgtttttaaattcatcaacgccatagtcacgcacgagaccggaaataaggccggtttgatggtcaactaaaagcacggcagcatcatcttttgaaagacgggaatagagatcagacattttatataatcctccttgaattaaggcaagtaagtttgtgaattgaaaacggtaaatctattcatatgctgtgtagatagaaagttatttctgaggtgacttctcgtgagggtgatgatccttcaattaatctggaacgggaaccggagcatgatcaatccaatggatgaactgttgtaaatagcgttgaagataacgttttgtttgttcatccgtaagtatgttttgagcggaatcaattttctcatggacttgcgaaatcagcattttttgaaatggcaaaacattgacttgcatagcttcgagtacttctctcaattgcgtttgaccaaaggcagtgccgaaccctccgggggttgctccgattaagccaaccggttttctgtttaaaacagaagaggtccgcggtctcgatgcccagtccaatacattttttaatacccccggaattccggaattgtactctggacttacaatgatgacgccgtcaacgtcttgtatatcagctctaaaggatgttacggagtctggtgctccggtaatttctaaatcttcgttaaaaaaaggaagactgtctatttcaacccagcgaaattgagccgcattatcgaagtcaatcaatgattgagcaattgctcgattatacgagttttttcgtaaacttccacaaataagaccaatggttttagtcataaaatcacctcccggtataaaatcactttcatcttaacacgatacacaaatatagacactatttttaaaaatggacatttatgccttaatattcctgtgcggcagcctctcaagaggagtactatataaaaagaaccgtcccctcgggattggcgatggatgtcatcctgctccaaagtaaaggtgatacgttcctggatcaccaacattcgattcgttatccctctcacagttaatacaaatataaccatctcgaatccgggatattgtataaaaaatgaacgcatctttagcgcaaatcccgtattcatccgcccttcttcatgacttgatttagcgggtgagttcatataaagtgaaagagaaaacaattcaccgtgatggagggacaagcaaatgacgcatgtacgctttgattactcaagagcgttaccttttttcaatgaacatgaacttacatacgcacgtgatttcgtaaaaacggcacaccataatatccatgaaaaaacaggcgccggaagcgactttttaggatgggtggacctccctgaaaactacgataaagaagaattcgcgcgcattaaaaaaagcgctgaaaaaatcaaatcagattcagacgtgcttctcgtcgtgggtatcggcggttcatacttaggcgcccgcgcggcgattgaagcgctcaatcattctttctataatgttctgccgaaagacaagcgcaaaaaccctcaagttatctttatcggcaacaatatcagctcaacttatatgaaagatgttatggatcttttggaagacgctgatttctctatcaatgtcatttctaaatcaggcacgacgacggaacctgcaatcgctttccggattttccgcaaacttcttgaagaaaaatacggaaaagaagaagcgaaagcgcggatttacgcgacgacagataaagagcgcggcgctttaaaaacgctttctaatgaagaaggcttcgaatcattcgttattcctgatgatgtcggcggacgtttctccgttctgactgcggtaggtcttctgccgattgcggtaagcggggctgatatcgatgaaatgatgaaaggcgctcttgatgcaagcaaagacttttccagctcggaattagaagagaacgcggcttaccaatacgccgtcgtccgcaacgttctgtataataaaggaagaactattgaaatgctcatcaactatgagcctgcgctgcaatactttgcagaatggtggaagcagctcttcggcgaaagtgaaggaaaagatgaaaaaggcatctatccttcttccgctaacttctcaacagaccttcactctctcggtcaatacgtgcaggaaggcagacgcgatctgtttgaaaccgtattaaacgttgaaaaaccgaagcatgagctgacaattgaagaagcggaaaatgatctcgacggcttaaattacttagccggcaaaacggtcgatttcgtcaacaaaaaagcgttcgaagggacgatgcttgcccatacagacggaaaagtgccgaacttaattgtcaatattccggagcttaatgcatatacatttggatatctcgtctatttctttgaaaaagcggtggcgatgagcggttatctgctcggagtcaacccgtttgatcagccgggtgttgaagcctataaggtgaatatgttcgcgcttctcggcaaaccgggctttgaagagaaaaaagcagagcttgaaaaacgccttgaaaaataaaaagaagggctggccctcagcatgacgggtcagccttttttaaaccgtgaaaggtgtgatgatgaattgatgcggctcttatgtaagcatgccgtcatttccgtctgttccgccgctattgtctattcggcactaaaactgtctcctgaatccctcttacaaaccatcctgtttttcgctttccctcttggcttgtttacggacatggtccggctgaaactgaagattggccggatgcagtcgctgatcacgaagtgctgtctctattccgccgttttctatatttcaacggaagccgttctctccgcaattgtgacgtatgttctgattgaatgcgccgttacctctttccggcgtctgtctgccgctcccgattcttcccggccgccgtatgaagatgccgcagagcggggacgctaaagacaaaaaggagcatatgcacatgatcagcataccatcttcacttgaggggcaatcttttttactccgcgaattggaacaggtgctgaaaccgatcggttataccatcggaggcggctgggagtatgaccgcgggttctttgattacaaaatttccgatcaggacggctatttatttctccgcatccctattgaagcaaataagggacacctggatgaacggggggccgccgttacaatcggcacaccctttttgctgaggcacgtctatcagcaggaaacggattatcacgcaggcggcggtgtttttgagtcattattcaaccaattctccgagccgaaacggcgggatgcggcaattgaccgctcatatacagatatcggcatctcgcttgtgaaagagctggaagacgtcctgctgcattaaagagccaaaaacagatcagtatcgagcacctggtatgacaggggaggggtcagcatcggcccctcttctttttgtatgccgatgatcgtggtattccgtttgagataatagagcgcacagtcatgataagatgagccctttaattccccgggaacgggaatgatgcgcacctttttctccagcgtcagatctgacagcgtttgcggtttggcaagctgcagcttgacccggtaatgctcaaacatcacccggctcgacagccgtgatgtgcacagaatcttattggctcctgcgcgctcggcgtttttgacataccgttccgttaaaatttccacgatacaataaacggacgggtgcagccctttgatggcgagaagcgttaataccgacagcatatcagcttcggattcatttttctgctgatcagctgtcagaatgacggtatcagcttccgtaatattcgctttattgagcgtgctgtcatcagcggcatgtccgcggatgaaatggacgttttcaataagcggcccttcccttaatgaatcatcaatcaggacgacagtttttgacggtgcgatgtgctgcagttctttcagcagcatatgcgacttctcattccatccgataagaatgacgtgccccttgcctttaaaggcgaccttcccttcgacatagcgatgctgtttgctgaacacggctgaagaaagcgtggcgaaataggcggtcacaaaactcgctccgcttaatacaagcaccataccggcaatctgcccgagcggcgtctggggaacgtaatcgccgtagccgactgtggccaccgtaatcaccgcccaccaaaccccttcaaacacagacgtgaattgcttcggttcgagcatgtaaatgagttggccgaacaataaaatcaaggcgataatgatcagtccgatccgaacatataacggccatctcagccaggaaataaataaacggtttgatttcattcgtccggctcttctttcgacagagagatggataaaatctgcttaataatggtgtttagtttttcgtccagctgttcctggccgtatgagtcacgcgcatgtctgattaaatcggccgtctcatcttcaaactgaatgagaggttcatcgttttctgcttcattatagagctggatgaaggcgtcaagcccttcgttcattctgtctatcgcattgctcagctgttctttctcgccatttgtcactttcatgtcgatcacacctgtatctttttttatacagtatgtcccagttcgtttgatgtctttcaaaaatcgccgaaaacatattcacccttattttttcatatgataaagaaagcggaccgaaaaagggtgagtcaaatgacagtcattcaaaaactgctggcggcgctggccggagcgcagctgctcgcttcggcggccgtattgcttattttcgatttgaatggatacaatcacatgtccggcggattctcatggcttgtttttgcaaaagagaccgcaggcacgtttccgttttacatcggattggccgggtgtatcctcatcatgctcggaggattgattcctgtcagaaaaaagaagcggatttctgtacaggaaagcggacaatcattaaaataatatataagcagatcgtacgatataagtgaaaaaggaagaggataatatgctgtttatatttttaacaattgctgcattgggattgtcgttttgggcacaatttaaagtgaaaagcaattttcagaaatactcagacgtggaagcttccagtcagcggacgggggcggaaacggcaagacggattcttgatattaacggtttatatgatgtgccggtagaaccggtaagaggcactttaacagaccattacgacccgacggagcgggtggtgcgtttatctgagccggtatattacggccgctccatttccgccatttccgtcgcttcccatgaagtcggacatgctttgcagcatcaggaatcatacggcgcgcttgtgctgaggcacaaaatttttccggtcgtcaattttgcctccggggttgcccctctgcttttcttgggcgggatgctcctgggcagcttgaacttaatcggactcggcattattttgttttcggccgctgtttttttccagcttgtcacactgcctgtcgagtttaatgccagcgcgagggcgaagcggattatcgtgtcggaaggattcattcgcaacagtgaagaacacggcgtgaataaagtgctgaacgccgccgcgctgacgtatgtggctgcggcgctcgtttcattattcgagctgcttcgttttgtgatgattttcttaaatggtcgtgatgagaattaacacgaaggaggtggccccttaccgtttgcggtaggggtttttttgcttatattaaaactgattctcattatgctgttaatcggattaacggccatctttgtcgctgcggaatttgcgattgtcaaaatccgcggttcaaaaatcgcggagctggttgaaaccggagacagccgggcgctcgcggcgcacagggtgatttcaaatctcgatgaatatttatcagcgtgccagctcggcattacgattacggcgctcggactcggctggctcggtgaaccgacgattcagcggcttcttcatcctgttttcagcctgatcggaatgccgtcatctattacgcacgtcgtcacgtttattgcggcgtttatcgccgtcacgtatctgcacgtcgtcatcggagagcttgcgccgaaaacgatatccattcaaaaagccgaagccgtcagtctgtggacggcgaaaccgctcattctgttttataaagtgatgtatccgtttattaagctgttaaacggctcagccggatttttggtcaagctgttcggttttcattcggtgaaagaacatgaggtcgtggtcagtgaagaggaattgcggctgattttgtccgaaagctataaaaaaggtcaaatcaatcaatccgaattccgttacgtcaataaaatatttgaattcgataaccgggtcgccagagaaatcatggtgccgcgcaccgaaatcgccgccatctcgcttgaacagtcagttgatgaagccatacatttgatcatcaacgaacggtatacgcgatatccggttattaaggaagacaaagatcacattctcggcattattaacaataaggatttatttaaagcgtattttctcggccgctccattgaattaaaagaaattatgcgtccggtcatcagagtcattgaaagcatccccgttcaggagcttttgatccgcatgcagaaggagcggattcatatggcgattctcgttgacgaatacggcggcacggcgggacttgtgaccgtcgaagacatattggaggaaatcgtcggggaaatccgtgatgaatatgaccaggatgaaatgccccacatcgtcaaaaaaggcgaacaccactatgtgatggacggcaaggcgctcatagaagaggtgaatgatctccttgatatcgccatcgaaaatgaagacattgacacgattgccggctggctcttaacacaaaaaatggagctgaaaaatggtgatgtgtttcatgccgaagggtgtgaatttaaggtgctggaagcggaagaccatcatatccgcttcgttgaaattaaaaaaactgatttctgagcctcctgcttttgcaatgaggctttttttatgaaaaaaatgcttcttcgtcccgctccttcatatgctgtaaagaaaggagtgtcggtatgaaaacggattggtggaaaacggcggccgtctatcaaatttatccccgaagttttatggattcgaacggggacggaatcggcgacatgaacggcatcagagcaaagcttcattacataaaagagttgggggcggatgtgatctggctttgtcccgtttttgactcgccgggggcggacaacggctacgatattcggaattataaacaaattgccggcgaattcgggacgatggaggattttgaccggctccttgcggatgtccatgcgctcggcatgaagctgattatagacctcgtcatcaaccatacaagcgatgagcacccttggtttatcgaatcacgctcagcgaaagattccgaaaaacgggactggtacatctggagagacggaaaaaacggcaaagagccgaacaattgggaaagcattttcggcggatcagcgtgggaatatgatcaagagaccggccagtattacctgcacctgtttgacaaaaaacagcctgatttaaattgggaaaacgaagcgatgaggcagtccgtttatgagatggtccgctggtggcttgataaaggcatagacggcttccgggtggatgccatttctcacattaagaaaaaagaagggctccctgacatgccgaatccggacggtctcccatacgtcccgtctttcccgtatcatatgaatggggaaggcataatggatctgttaaaagagctgaaacgggaaacattttcgcgctatccgatcatgacggtcggcgaggcgaacggagtggcggcttgggaggcggctgattgggccggtgaagaaaacggcatctttcaaatgatttttcaatttgaacatctcggcctctgggatacggaagatgatcaaagcatctccattccggcgcttaagcgcgtcttgtccggttggcagaacagtcttgaaggaaaaggctggaacgcgttgtttatggagaaccacgatcagccccgttccgtctcggtatggggtgacgaacggtttttgacagaaagcgccaaggcactcgccgcgatgtatatgctgatgaaaggcacgccgtttatttaccaggggcaggagctcgggatgaccaatgtttcgtttccatccattgaagattatgatgacgcctcaatgaaatatttgtatgaaaaagagacgtcccgcggcgttccgcatgaaaaagtgatgaagatcatctggaagaagggccgggataattcacggacaccgatgcaatggagcggtgaggcgaacggcgggttttctgatgcttctccgtggctcggagtgaatccgaactacacatggctgaatgctgcatcacaaatgcaggatgaaacatccgtataccatttctacaaacggctgctcgccctcagaaaagaatacggcgtattgatcagcggcacatacgaattgctgcttccgaatgaccggcagatttatgcctatctaagaaaaaacggaacaacaaccgccctgatcatcacaaatctgtcccgaacccccgctttatacaggcatcccggttatccgcttgactccgattctctcgtgcttgcaaacgcagaaacagaagcgcaccgtcatgtgacatcctttcttttaaagccttatgaggcccgcgtatatatatggtgaaaaacttcagtcccgaggctgaagttttttgtgatctgcgtttatcatcgcgatccgacaggaaaagacaaatacagaaacgaatatgggaaaggaagagaaaaagaaaggaggcatttatatgctgaaaaaattgcagattcaaacaaacagacgggatgaaatgatcgacatcacacatgaagctgaagcgtttctccgcgaaacaggcgtgaaaaacggtttggcgctcatatactgtccccatacaaccgccggcattaccataaatgaaaatgccgatccggatgtgaagagggatatgctcagaaggtttgatgaaatgtatccgtgggagcacgaactggaccggcatatggagggaaatacggcggcacatatgaaagcgagtacaaccggcgcctcccagcatgtcatcatagaagacgggcgcctgatactcggaacatggcagggcgtttatttttgcgaatttgacggtccgcgaaacagaacatgttatatcaaaatacaggctgaaccggaggaaaacacaaatgagtgagtggatgagtgcattatcattaacaaagcccgtcattcaggcgccgatggccggcgggctggtcacgccgtgtctggcttcggcggtatcaaatgaaggggcgctcggaagccttgcttcaggatacgtcagcccgcaagcgcttgaaaaacagcttatcgagatgaaagagctgacggaccgctcctttcaagtaaatcttttcgtcccggaagaaaggcagatgcctgaggcggaactggttgaaaaatggaaagcccgcattccgagggcaaaagacgccaagccgttctctgatctgaaagaagaatggaatgattttgaggaaaaagcggagcttctgatccgttacggagtcaaagcgtgttcattcaccttcggcctgccgccggaagaaacggcggaaaagctgaagaaaagcggttgtttccttttcggcacggcgacaacgccggaggaagcgaaggcttttgaagaacgggggatggacgccgttatccttcagggaatagaagccggcggacatcgcgggtcgtttctgccggttaaaggagaaccggctctcggccttatggcgctgattccgcaggctaaagacgcgctgaatatcccggtgattgcggcaggcggcatttttgaccgccgcggcgtgcaggcggcccgatgtttgggtgcggacggcgttcaagtcggaacaccgtttctcctttgtgaagaaagcagcgcctcaccggcatatcaaaaagccattgccgaatcaaaaggagccgacacgcggctgaccaccctgttttcgggaaaacaggcgcggggaatcgtgaatcagttcatgaaaacatatgaagctgacgagggaaatacactgccttatccgctgcataatacgctgacaaagccgatgcgcgggcacgcggctcaatcaggagacgcggagtatatgtctttatgggccggccagtccgccgcgaaacttgaagggccgacagacgtgaaaaccgttttggacagattgtgcgaatcataatccagaaatcgtgaggtgatggatgatgaagattcttcaaatgtcctataaaaaaagagggactattgagtttgtctttgaagattttccgcattctaaagtcaccatggcgccgattaaagggtattactttgtccgcgccattaaatggagccgacgggacagagccgtaacccgccatgatttagagaagtttgaatgggctgcaaaccaagcgctcggcacgacggctttttaccggaaaagaaaagcattccgcatcccatcgtcacaatgacagacgatgggattgttttaatgcatgatctgataaagcgcgggtgcatcaagccttgttgcctggtttagcagataagccggctgcacggcatttttttttcttagagaattcaatctctgaatgatttgttcagcggtcagaatcccgagaccgtgggcgaaatattgatcattccccatcacaatgacattctctccccgccactgagcctttgcaggattaaaatcaggatttttaaaatataaacaatctccccgtaaaaagtggctgccggtttccgtgtagatcggcagatgctcatagtgccagtcatacaaagtgatatcccggaaacgccggttaaaccgttcttcaccgattgtctttaagacggccagataataaattacaacaatggcggtagcgcattcaaatgcgtaaaacgccccattttcaataatgtcccgaatcgcttttgaagcggggattctgtacttcagctccaaggctccttccggcgtcactctccaataagccgtatttccgtatgttttggcgaaagttgcaaatttcacacctgatccgtgcagttctcttgcggcttccacaatatggcggcgcagccgcacctcgaacatcagttcagcaatcgacccgtaatcgaattgtacgggagaattgagcagttcatttatatacggaacaaggctttcttccgtctgccagttcgcgatgtcctgaggccgaagcacttggccggatatgataatcatctgcgcgccccctatctttttttataagatatgcaggaagcttgggcaatgaaaatcaagtcataaaaaaggaggaaatgttaacaaaatgtgaagactgagccgatatataaggtatcacacttgagggagcagcttaatatgaaaaaattcatcaattggtgcacaaaggcatcgatttcacgtaaattaatcatttcatttatcgtgatcttaatcataccgattctcgtgttagaattcagttcataccatacggcgagcaattcgctggatgatcagatttcaggcaacgcgaaaaataacattgaatcttttaacacaacgattacaaatgatatcggcgcaaaagcaaaggcgattgaatttttcagtgaaacgttaaaagggtcatccttctcaaagaaaaacatgtctgctcttgaagaaaagttcgggcaatacacgtctattcataaggacgtagcccgcatttacggaggaacggaagacggcagctacgcacaggcgccgaaggaaaatactccggccgattacgatccgagaacacgcacttggtataaagacgctgtgaaggctggcggcacgctcgttgtcaccgacccttacaccgcggcaagcgacggcagcatggtcgtcaccgtggcaaagcagatgcaggacggaacaggcgtagtggccatggatattacgattgaccagctgctgaagcagatgcagggaatcaaaatcgggcaaaaaggcttcgtgtttatcacgtccaaaaataaaacctatgtcgcgcataaagatcacaaaccgggcgataaagtttcaaccccgtggctgaatgaggtatacagcaaagacagcggcattatttcatacaagctcgatgatcaaaataaaaaaatggcgtttacgacaaataaactgaccggatggaaaatagaggggagcatggagctcaacgaaattaaagacgcctcacaaccggtgctgacgatgggaatgatcgtccttgcagcatccattatcatcgggggaattttaattctgttgattgtcagatccattacgtcgccgctgaaacggcttgtccgctcttctaaacaaatcagcggcggagacttgaccgagaccattgatatccgctcgaaagatgaattgggcgaactcggcgcgagctttaatgaaatgggagaatctctgcggggactgatcagcgcgatccaaaactctgtcgacaacgtggccgcgtcatcggaagagctgaccgcttcagcttcgcagacaagcaaagcgacggaacatattacaatggcgattgagcagttttcaaacggaaacgaagagcaaagcgaaaaagtcgattcaagctcagctaagctgaatcatataaatgacggactcgccgccgtttcccgcacatcatcatccattacggaagcatctaaacaatcgaaggaagctgccggcaccggggaagaatatgtgcagcaaaccgtcgggcagatgaatctcatcaatcaatcggtccagcaggcggaagcggttgtaaaaggccttgaggccaaatcaaaagacatcactcatattttaagagtcatcaacggtattgccgatcagacaaacctgcttgcgttaaatgcagccattgaagcggcaagagccggtgaatacggccggggcttctcagtggtagccgaagaagtgcgcaagcttgccgtccaatccgccggttctgccaaagagattgaaaaactcattcaggaaatcacggctgaaattaatacatcgcttcacatgttcacatccgttaatgaagaagttcaatcaggacttgccgtaacggaccgcacgaaagaaagcttccagaatatcttcggcatgacaaacgacatcgccgagaagcttcaatcgatgaacggcacggttgaacagctgtcggacagctctcagcacgtttcagccgtggtgaccgatattgcggacgtatcacgggaaagcgcagcaagcattcaggatattgccgcatccgcagaagaacagcttgcatcaatggaagaaatcagcacatccgccgatactttggcgcaaatggccgaagaactgcgggaattaacgaaacaatttaaaatcaactagtaaaaaaggacgctttccggatggagggcgtctttttttatagtgacatccggataattaaatgaaaagtcttgcatgcaaagggagtacatagaactatttttcatttatgacttaattttcaatgtaataaaaagggagtcggccgatataaacagtaaatgattgaaagaggtttacaaaattgaaaaaaacagcaaaaaaaatcgccagaaaatcaatagcaaaaaaacttatcatttcatttttactgatcttaattattccggtagcagtattggctgccggcgcctaccattcggcggcttcatccgttgaaaagcaaatgatggaaagcgccgaaggaaatgtgcaaatcttaaacaatatgattgatgaccggatcggaatgtttacaaaaagctcagcatatttcagcgaatgggcgacaagcgccaaatttaaagaaaaaaaccaaacggaaatgcaagaaaggttcaagcagtttattgaaagcaatgataaagcttccgccgtattttcaagcagcaaggaaggaacgtttacccgttatccgcatgccgatatgccggccgatttcaatccgcttgaaagaagctggtatcaggaagccatggagaataaaggccaaaccatcatcacagacccttatgagtccatctcaaacaaaaagatggtcgtcaccatggcccgcgcggcacaagacggatcaggcgtcgtcgccattgatataaaaatcgacgatctcatcacgatgacaaaagaagtgaacatcggaaaagaaggatacgcctttatcctcagcaaaaataaaaaagccgttgcctacagtgatgaaaaagccggctcggcggtatcgggaaaatgggttgatacattatacagcgggcaaaaaggcgactatgaatatacgctgaacgggaaagcgaaaaaaatggcgtacgtgaccaatgaagcgacgggctggaagatcagcggaaccatgtccgtggatgaaatcaaggatgcggcaagaccggttctgactctggccgttatcatattggcgatagccattgccgcaggaatgattttcatttattttgtcatccgctcaattaccaaaccgttaaaacgtctcgtagcttcagcggaaaaaatcagcagcggagatctgacggaaaccattgatgtcagctctcaagatgagctgggcgtgctcggtaaaagttttaatcatatgacaaattcactccgttcgcttattcagggaattcaggactctgttgaacatgtcgcttcttcctcagaggagctgacggcttcggctgagcagacgagcaaagcaacggaacatatcacccttgcgattgaacagttttctaatggaacggaagaccaaagtgagagtattgataaagcgacagcccaagtgaatgagatgaaagacgggctcagcgatctggcggaagcggcagccgtggtgacggaaacgtcaattgaatcggcggagatatccggcgccggtgagcggcttgtcaagaaaacagccggccagatgggcgccattgaccaatccgtaagtaaagcggagcaagtcgtacaagggcttgaactcaaatcgcaggacatcaccagcattttgcgcgtcattaacggcattgccgatcaaacgaatctccttgctttaaatgcagccattgaagcggcaagagcgggagaatacggacgcggtttttcagtcgttgccgaagaagtgagaaagcttgccgtccaatccgccgattcagcgaaagaaatcgaatccttaattcatgaaatcgtcaaagaaattcatacttcgctcggaatgctggaatccgtcaatcacgaggtgaaaagcggacttcagttaacggacgaaacggaaaaaagcttccgggacatttccgttaaaacaaatcagattgccggtgaactgcaaaatatgaatgcaaccgtggaacagctttctgccggatctcaggaagtatcaaacgcttcagaggatatcgcggccgtctccagacaaagcgcggccggcattcaggacatcgcggcttcagctgaagagcagcttgcgtccatggaggagatcagttcctccgccgtcacgctggaaaaaatggcggaagaattacgcgaactgacaaagcgttttaagataaactcttaattaagtctaaaagactaattcaacaataggtaaaaagtatgtttcgttatatttcttctttttggatgtgtatatttacccataattgccgatatgaagggtaaacacgcaagaggagatatagcagatgaaaaaaattgtgcaaatcatcaagcagagatcacttacaagaaaactgctcatttcttttttggccattctcattcttcctatttcaacgctggcttttatcgcctatcaatcggcggtaagcacgcttgacaggcagatgatgggaagcgcactagataatgtgcagcagattaacgatatgatcaacacaagcatcagccaaaaagaagacggaacggcatatttcagtgattggctcacaaaggatcggtacaagccgaaaaaccaatcgcaaattaccgataaattcacagagtacatgaagatcaataaagacgtggaatccatttatacgagtgacacggaaggacacttcacacggtatccggatctgcagatgcctaaaggatataatcccattgaaagagactggtataaaaaggccgtggaaaataaggggaaagttgttgtaacagatccttaccgcacggcttccaccaatacgatggtcgtaacggtcgttcagcagacgaaagacggctcaggagtcgtcgccatcaatatgaaaatcgatgagcttctgaaaacgacgaagaaagtgaacatcggaaaatcaggctacgcttttatcctgacgaaagacaaaaaagtggtcgcccacccgaaccgcacatcaggcacagtattaaacggggagtgggctgaacagctgttcaccagcaaaaaaggtgattttcaatacaaatacgacggccaggaaaagaaaatggcttatgatacaaacgggctgacaggctggaagattaccggaacgatgtatctggacgaaattcatgaagcggccctgccgatccttcatctgtccctgctcgttctcgtattagcgattgtcatcggaaccatcgtcatggtgctgattatccgttcaatcacaaaaccgctcaagcagcttgtgacatcatcgaaacagatcagtgaaggcgatttaacagaaacgatcgagattcagtcaaaagatgaattaggcgagcttggcaaaagctttaacaatatggccgcttcgctaaggtctctcatccatgccatccaggattccgtgaataacgtcgcatcttcctcagaggagctgacggcttcagcggagcagacaagcaaggcaaccgaacatatcacactggcgatcgaacaattttctaacggaaatgaaagccaaagtgaaaatattgaaagcgcggcggaacatatttaccaaatgaacagcgggcttaaagatatggcgaaagcatctgccgtcattaccgaatcctccgccacatcagcggaagtcgccaattcaggcggaaagctcgtccaccagacggtcggccaaatgaacgtcattgaccggtcagtgaaagaagctgaacaagtggtgcgcggacttgaaacaaaatcaaaagacattacaaacattctccgtgtcattaacggaatcgctgatcagacaaaccttcttgcgctgaacgcggcaattgaagccgcgcgtgcgggtgaatacggccggggcttctcagtcgtcgccgaagaggtcagaaaacttgcggtccagtctgccgattcagcgaaagaaatcgaaagcttaattatagaaatcgtcaacgaaatcaatacatctctcggcatgttccaatccgtcaacaaagaggtggagagcggactggatattacgaatcagaccgaaacgagcttcaaacggatttctgaaatgacgaaccagatcgccggagaaattcaaaatatgaatgcgacggtagaacagctgacagcaggatctcagcagatttcaggagcttctgagcaaatcgcgtccatcgcaaaagaaagctccgccagcattcaggatatcgcggcctccgccgaagaacagctggcttcaatggaagaaatcagttcgtcttcggaaacgttatcccaaatggcggaagaattacgtgatatgacgaaacgatttaaaatagattaaaataggtcatagaacacccaaatgtgctgtttgggtgttttttttagtttttttaataaatcttttgtcctatctgacgatattagatttagcttttcaaagaaggagactgaaaaaatgaaacaactgatacattggatcaaacagccatccatcagcaagccgctgatcgcggcatttttagccgtattggtgcttccggtcggcatactcgcctacttcagctaccaaacggcggggagtacattagaaagcgaactgacccacagcgcccagggaaatgtcagcgaactgaacagcgtgctggaaaacatgctcgaaggcaagctgaaagcgattgactactacagcgaatcaatcacaaaggaaaaattgaatacgaaaaataaatcggtactgcttgaaaatatgaagcagtatgtcaccgtaaatgacgatgtcgcgtcaatttacgccgcgtctcgcgataaagcgttcgtgaaatatccgtccgttgatatgccgtccgattataatccgctcacacgcgagtggtataccaaagcggttgaaaaaagcggacagccggtgtttaccgagccttataaagacgctgcaaccggacagacggttgttacgatcgcccagcagacaaaagacggatcaggcgttgtggcgcttgatattaatcttggcgacctgctgaacgcttccgaacgcgtccagatcggtcataaaggatttgccttcattacaacgggagataaaaaatacatcgcccatccgactataaaagcgggaacggaaggctccggagcgtggacgaaagaagtgttttccaaatcaagcggatcgtttgaatacatgtttgaaggacagcagaagaaaatggccttcacgacaaacaaactgacgggctggaaaatcgccggcacattttttgtcagtgagatccatgacgcagcctcgcctgtcatgaaaatggcgctgatcatcctggcggtttctcttatcgtcggcgggattttaatcttttttatcattcgctcgattgcaaaaccgctcaaaaaacttgtttcgacatcagctaaaatcagtgacggcgatttaacggcagtcattgatatcaagtcaaaaaatgaattcgggcagctcagccaaagcttcaatgagatgtcggcctcactccggtctgtcatcggcgtcattcaatcatccgtcgaacatgtcgcttcttcatccgaagagctgacggcatccgccggacagacgagcaaggcgacagagcatattacactggcgattgaacaattctcaaacggaaacgaatcacaaagcgagaaattggaagaaagtgctgatcacctttcccaaatgaatgccggcattgccgagacggcgaatgtatcggcggaaatcactgaatccgccatccaaacctctgaaacggccggaagcggagaagaattagtggcgaaaacggtaggccagatgaaaacaattgatcgttccgtacagcaggcggaagcggtcgtaaaagggctggaaacgaagtcgcacgacattaagagcattctcaacgtcattaacggcattgccgatcaaacaaatctgcttgccttaaacgctgccattgaagcagccagagcaggcgaatacgggcggggcttctccgtcgttgcggaagaagtgagaaagcttgccgtacaatcagccggctccgcgaaggaaatcgaaacgctgattcaggaaatcgtcaaagaaatcgccacatcgctttccgtattccaagcggtgaatcaagatgtgaaggaaggcctcgatattacggatcaaacggccgaaagcttcaaaaaaatctcagaaatgacgactcagatttcaggcgccttgcagcatatgaacggaacgcttgagaagcttgcagccgggtcgcaaaatgtgacaaacgcggtggaggacattacctcagtcgccaaagaagggtccgccggcattcaagacatcgccgcctcagctgaagagcagctggcctccatggaagaaatcagttcatccgccgaaacgcttgcgcatatggctgaagaactgcagcaggtcacacggaaatttacgattcagtctgaagacgaagaacagctgtagcgagctgtttcttttcctcatctgaaaaaagcgatacactagtataaaagaagggagtggcagtgatgagattagaaggcaaaaaagtcatagcgcttgtcagtgacgattttgaagacttagagctttggtatcccgtctaccggctgagagaggaaggcgcgatcgttcatttaataggagaagaagcgggccgtttatacaaaggaaaatatggtgtgcccgcgacggcggattacgattttaagagcttgattatccaggagtatgatgccgtgctcgtgcctggcggctgggctcctgacaaactgcgaagatatcccgaagttttggagatcatccgtacgatgaacgagcagaaaaagccgatcggccagatctgccatgcgggctgggtgctcatatctgccggaattctcgcaggaaaaaaagtaacgagcacgcccggcatcagagacgacatgacaaatgcaggggcacagtggctggatgaagcagtcgtaactgacggccacattgtatcaagccgccgcccgcccgaccttccgcagtatgcaaaagcgtttgctgacctgttagcgtccaaataaaaaacatccgcccgaatccgggcggatgtttttagttttgatcggcgggaaagacaattccgatttgttttctcgcttcctccataatgcttgccgtaatgaaagaacgttcaaatgtattttcggaagactcccgctgtccgtttcgaagaagattgatgaattcagtcgtttcgtagtacatcgacggtttcagatcagggactgaaatgtcttccgtccggccgtcacgatagcggatttccgcccgttccggcccatgaatgctgtccagcacgatcgtgccgtcctcaccctgaatttccgccggggcaaacgaatttgagattttcgaatgcatcagcaccgcttcaaatccgtcgtatgacagaatgaccgtgccttcgccgtcaacgccggatgagagtttatgaccggtcgcaatgacgtttttcggtttgccgaacaggacgacggccggataaatgcagtacacgccgatgtccattaacgaaccgttcgataattcaggcttaaacgcgtttagcaccgtaccgtttttatatgcatcgtatcgtgatgaatattggcagtaacttgccgtgaatctcctgacgggtccgattttatgtaagtggttttgaagcatgctgaagttcggcaggaacgttgttttcatggcttccatcaagagaacgccgttcgttttggctgcgtgaatcatttcatccgtttcccttgcgttagacgcaaacggtttttcgcacagtacatgcttgccgtgttccataaaaaggaccgcctgctctttgtgaaatgcattcgggctggcgagatacaccgcgtcataggcttcgctttccgccatttctttcaggctggtaaaataatgagcagcgccgtgtttgccggcgaattccgccgcacgttcctcagttctggaataaaccgccgttaattgaaaatcatcaatagcagaagccgcctccagaaatcgttctgtaatccaattcgttccgactgttgcaaatcgaatcattgctatcgctccttctatgtattggcttacattatagctttttttctgagaaacataaatggaaaaaaggctggcagctaaagagataggaaaaattcccatagagaccggttattatttttcattacaggaacgatagtgtacaatttaagtaaaatacatatgatggaggaacaatagtggaaacattgcaaacatggggcggcagatttaaacagtttttcttagacaataaatttgtcttgtttttgcttgtattgctgctcatcggtctcaatatccttgtctttatgaagacatcatttattttcacacccattatcgtcctgctcaaaacgattgcgctccccgtcattttgacaggaatcgtttattatctgcttaatccgatcgtagatatattggaaaaaataagagtgaaaagagtctattccatcctgctcctttacctcattattatagggctgattacgattacggtcgtttcaattattccgtttttaaaggaacagatcatgagcctgatcgacaatctgccgaaatatgtggatattgttgaagatcagacgaaaagcctgatcggaagcgattttgtaaatcaggcgcaaaagacgatgaatatcaacatttccgatcttgctaataaagtatcggcgcaggcggcgacaattgcaaacagcacatttaccggggtcgggaattttatcggcgcgctgacggaagtaattatttcaattgtgaccgtgccgtttattctgttctatttgctgaaagacggcaaaaaactgccaatctatatcttaaagtttgtgcccacccgtctgaaagaacaaacgtatacgatgcttagtgaaatgaaccacagattaagctcctatattagaggacaggtcatcgtcagcttctgcatcgggtttttattatttatcggctatctgattatcggacttgattatgcgtcactgcttgcggtcattgccgcttgtacgagcgttgttccgtatttagggccgaccattgctatcacgccggcgattattatcgcgttggtcacttcgccccttatgctgctgaagcttgcgattgtctggaccgttgtccagctcgtggaaggaaaattaatttctccgcagatcatggggaaaaatcttcacattcacccgattaccatcatctttgttcttttaactgccggaaagctgttcggggttgtcggcattattttagccatcccggggtatgcggtcatcaaagtggtcacgacccatctgtttgattggttcaaaatgcgttcgcatttatatgaagaagaaaaaaatgatgctgtatcgaagtcataaaatcggaacggacatgatatttattataagacaggctttccttcagaggagagcttctcttttgtaaatgatgaatgaagggaagaatgggatgacactatgggaaatgttcacagcagccgttttaggaatcgtggaagggctgacggagtacgcgccggtttcttccacgggacatatgatcatagcggatgacatctggctgaaatccggaagcctgatgaatccggaagccgccaattccttcaaagtggtgattcagctcggttcgattctggcggtggccattgtgtttaaggatcggatattacatttactcggcctcaaaaaaaacgtcacgcgcgatcagcagaagggatacaggctgaccatcgcgcaaattgccgtcggtcttgttccggcggcggtgctcggctttttatttgaggatttcattgaccgctatttattctccgtcagaacggtcgcttacggattaattgccggagccgtgcttatgcttgtagcggactggatcaataaaaggaaagaaacgatcgatacggtagacagaatcacctacaaacaggctttctgtgtcggattattccagtgtctcgccttatggcccggattttcccgctcaggctcaacgattgccggaggtgtcattgtcggattgaatcaccgggcagccgcagacttcacatttattatggctattccgattatggcgggcgcaagccttctgaagctggtgaaatactggggcagtctttcttatgacatgattccgttttttcttgtcggctttatctgcgcctttgtcgtcgccctcttagtcgtcaagttttttcttaggctcattaaccggattaagcttgttccgttcgccatttaccgtgtcatcctcggcatcattttaatcatgttcgtgcgataaacgaagaggcccacgaagggtcttctttttatgttcgaaaaacgtctcaggaaaatatgagcaaactgaattttctgcttgaaattcatagaagactcgtctataataaaacatgacgttacagcacggggccatagctcagctgggagagcgctacgctggcagcgtagaggtcaggggttcgagcccccttggctccatacccgaatgaaaccgcggtatatcaacgttgactaaacgatgacttatccggtgactaaaacagcgtagcgcttccgattcggacagcgtggcgcaccgtttttcaatcgtcttccatacgaaatgggaggcgattttttatgcattcagaaaatcgaaaaggtaagcgtgtgaaggccggaagggcctcggtaaagacaacgcgaaaaggtacgtacgatctcgaatacatattcgatagactgtgcgatgccaaacgtgctgagaatgtcttcaggaaacgattgataagtacatgcgtgcttgttgatatttgtcggattatgctgaagagatcggagtgtccgcagacatacgtcatattgacgttgactttgcgcgcggctttgtatcgtggctgattaacgataaaataaagttcgacggtcacagtttcaaattggacgagcataagacgcaggggttatctccgcggtcagttaacgactatattaagaccatacggacgttttttcgtttcgcgattaaagaggcgtatgcggacgataacccattcgaagaggtttatttgaatttttctgattgtgaattctgctgtgtcagatgctctggctgttgtatcgccaagccacaaactaccgtttgtaagataacgagctgaaaagcggcggaaaaaagaaggcaacagcctcaaagcctaaaaccactcaaaaatcaaaattcagcctgcctgcgggtatttttaaagtcacaagcccattgacccgaggggaggccgtaaaacagattcagacagcgctggcggctcttcattattatcccgataagaccgcaaagaatttcgggattgatggcgcatatggcgcgaaaacagcaaacgcggtaaaacggttccagcccatgtacggcctgactgctgacggagtatatggacctaaaacaaaagctgaactggaagcactattaaagtgaaaatagagttctgtctttgtttaatagggcgaccctttttgataaacaattgatttctaaacgaataagggcagcgattttcttataattcacttattttctattttcacctaaacccaacgttgtggactcaaaataaaatgctaccagtttttgtattagtattgtaatgaatcgcataaattaaagagaacacttacttatttttactcgggcaatacatgacaaaaatactatttaatgtattttatgaaaaatatgtattttaagtaaaattttaatgttataatttgtttgggccaaataacacttgtagatgcatctactaataggagaaaatgatgctaaagaaaaaagttcttgctggttgcttagcctttacaataatgctttcagcttccccactaacctcttttgcggcagaaagaagttctaataaaggtaatgaattattaacgtatgcccaagttcaaaaaactgagttgcagactattgctgagtctaaaagcaaatcagttggaaatacaagcggtgaattttctacacagggatggaagaaagatgcgcttgttcttgctcttagatacggcggtgattttgcaggggatttactaagtctgttaagcaagaaaaatgcaagttatgttaaaaagtattccaaagagctggctgatttccttgacaaagtttccagtgacattgagaaaaagttggttgattttatgatttttgatttggagctgccgcaatcagctgctcgtactattgcatgggcgattatgcaagttattggatgacgataaaggagtgactccatgagtttagaaaaagaagtagagcttctcaagtaccaaaattatttattaaaaacaattataaatggtgatgattatccattttttatgtttgctttagatcacaacttaaatgagaagcaagtcaaagcaactgtagagattttaagcatcttttctaatcgtcttaatggcgaaaaagagtctctcaatttaagaaaaaactctgcgggtaagaagtttgatgcgtttggcattgcggttgaagaagtctttaaaaacgaaaaaccaacaagaaaagaatttgagagttataaggataaaatcttttcttctgaaattgaaaccaaatatttattaatgagtcttcaaagacagcatattaagccaaatgtttgtgaatttttactgcaagataattaatgagaatttttgtccctccgcaaatgcggggggattttgcatttaaacgataaaagtatcggccgtatgatgaatgaaagtccttcttatgacgagaagggtttttttgttttttaagtccatgtatggcctgactgctgatggtatttacggaccgaaaacaaaagtgaaacttgatgcgttattgaaatgaaagaagccctactttttttacaagtagggctttttttgcgtttgaaagaataatatggtaaaaaaacataccatttaacattgatttttgatatattttaatagctgagtgcgttactccttctgaagtgtagtttccacgctacagatagaccatgcaggaaaaggaaggagggtacagtgattcattatgaaaaagcttagaccacgtaagttaagaatagcttcattcgtattcggcaatatcgcaaaaggtgtatattacctagtccagattgctctgcttcttcgaggataatgagatgaatctggccaccaggtattgaaaatgattaaagaaagggtggagctgaccactctcaccaaaactcaagcgcaattaccaatcctgtgaaggagagcgttttttctttaaacatgagtaaatgtctggtgtttttttattgtatttatatgatccccaaaaaagaacattttcaaacgaaaaaaacctcttatgcagatgaccagtccgcgagaggttttttgttacagaggatacagatagcaagtgatttggttgctatatgacagaagctcaaaacgccgttagagaaaaaaccttttgaaatcctgttcgctttaaccttcaactcaactatcgtgatccatttactcaaaagcttaatccacagtgccattatagcatgtttttttaaaaaggtaacattttttattatttttctaagaaatgttgtatttttttctgagatttattgacaagacgaagtttaaacgttccacttttcttttttttatcccaacttaaaatgcgctgtctcatcaaatttttcacagcagcacgtattgcttgctcatcttttccagttttccttttcaattgttccatggagggatttttcccgaagtgggtcatattaaaaataatccgatacactttacgttcaaaatcggtcattgcaattcaactcctgcaaaaatgatatgagaacgtaagttctgttgtcaataaatctgatttggggacagtcggggaccaagttattcatttttggtcagagtatataatttttcttcagaatcaccagcggcaaaacccaataaaataaggattgaatataaaacgtctgttcctatcagaaaagcatctccacactggcagcgtagaggtcaggggttcgagcccccttggctccatacctttaaacccttattctataagggtttttttgttttttcatcttctgcggcagcctctatattctgcttcatttctaacaactcaaaataaaggaaagagagaaaatgaaaaagaaaatctatcttatattatctctgtcagctgcactggcgctttttttgacagcgcttccgcctctttctcctgtcatcttcacgtctgcttcagaaaaaggagccatcaggcatgacatttataaaaaaggatatccgtatcaaagctactttgcgattcttcaaaaagaagaaggcggcggagaggccgggaacctttattatgtaaattggttcaattggaaagatgaaaccggacagacgccgcacgtatgttattcaaaaaaatcgtccgaaggcgagtacaaagtaagctgcggaaccggaccgtaatgatcaagagcccctctccaatgaggggctctttctgtcgagctgaatgccgctcaggctctccgtttaatatccccaatataacggcgtatcataatgccgatacggatcattcggataatgcgtatttggctgataaggcttattcatatcatgaatacccgtgttttcagtctgtccgcagtatttatcgggacctatcacagttgattgccggatcggtgaaacggctttttcccactcatgctcattcagacagtacgtatgcgccatgatctcaggcggcgtcagacggagaatatccgagccgtatatcacttcaggcgaaggggcgtcaaatatggccaaaaggtgggttttgtctgaagtggcaacttcataatgccaccacccttgcggaacattcgccacttgtcctgaagagatcggataattccgtattttctgggtgaacggattcagcatcgacaccaccgcggaacccgaaatacagtacaccaattcagcggcgttttgatgggtatgcggttcaatcacatttgtattgctcagaaagatatctaataatgaaatattttcaagcgtgtttaactgtttaatccccaatacattgataaagttccgagcatctttcgtaaaaaaacggctctcattcacattataagtgaactgtgtattcggagacgtgtaatcgatatcggaaaccatgcactcccccgctttcatctttaaacgtatattctcaaatatatgtgtccctgtttcaccgggtgataaaaaaaggaggtgaaatccataaattccaaatccaatacaatattgtgacgacttttttaaagattcattttcaatatatcttttattcgaaatatctcttactataaagatatattgaaaatacatctttagaagggttgaggattaacatgctggatgagagaacaatagacatcatcaaaagcacagtacccgtattgaaaacacatggagaaaacatcaccggacgcttttataacctgatgtttcaagatcatcccgaactgttaaatatgtttaaccaaacgaaccaaaagaaacagactcagcgcgcagcattgtcaaatgcagtcattgcggctgcggcgaatattgatcaattagaacaaatcattccggcggtcagacagatcggccataaacacacaagcatcggtgtaaaaccggaacattatccgattgtcggaaagtatctgcttctggcaattaaggatgtgctgcaggatgccgcaactcctgagattatgcaggcatgggaaaaagcttacggtgttattgcggaggctttcatcggcattgaaaaagacatgtacaatgaagccggatggcaggggtataaagaatttacggttatacagaaaacgaaagaaagcaaagatatcacatcattttatatcaaaccgagtgacggctcttcgcttcctggatttgaagcgggacaatatatcagcattaaagtgcggattgcggattctccttatacgcacattcgccagtacagcctgtctgatgcttctcaaaaaggggcatatcggatttctgtgaaaaaggacggagcggtttcttctcatctccacaatgaagttcaagagggagataaacttgaagtcagcgcacccgccggggatttcaagctgtcttctgccgaaaaaccggttgttcttattagtgccggttccggaatcacgccgatgatgagcatgctgaaaacagccgccgaaaaacagccggagcgttccgttacttttattcatgccgcgaaaaacggagagtacgccgcgttccgcaaagaggctgaacaagctgcggagaattatccgaatattaacgtcatttatgtatacagtgaaccggcagaacaagaccgctcaggagacaagcctttttacagcggccggattgatcaaaccttcctggagcagcttcatctgaatcaagatgctgaattttacttgtgcggatcagcgcagtttatgacgcaaatgaaagacacgattcttgcactcgggtttgactctgattccgttcaatatgaattgtttggccctcagctgagcatggcataacaaaaaagactcctcaaagaggagtcttttttgtttgcgcaatgtgttctttctccgtctttttccctgttttattgaaattttcatcaatgaccagtaaaattataaatctagtgattccggaattaaaggaaggttgatatgaaaaagaaagcaaagaccaaaagggtgcttgggtgcctttttgctgtatctcttatattcggattatttctggtatcaatggtgttttcgaaattcatagtgacggaagaaaaaccgcctgaagaggtggacgagcagcaggtctttattgacagcctttccgggcatgctcaaattttatatgagaaatatcatgtccttccgagcatcaccctcgcacaggccattctcgaatcggactgggggaacagtgagcttgcggggaaagcgcgcaacctgttcggtgtaaaaggtgattataaaggaaaacacgtcacgatgaaaacggatgaatttgaaaaaggaaaacgaaaaacgattcgggcaaaattccgtaaatacagcacgttttttgaatcaatggatgaccatgccaaattatttgtcaacggaacgtcttggaataaaaagaagtacaagcccgtcattgaagcggacaattataaaactgcggcggctgcccttcaaaaatccggctacgccacagaccccggctatgctgaaaaaattaaagatgtcatagaaacctataacctgaatgaatatgacaaaatcaatgcctctcttaaagcagttgatatgaaaggcgccatcaaagaccacgccattgaagacgtgtggtccaagccgtcaaaagagcggcattctattaaactggcatcggcgcaaaagtttaccggcgagcatattaaagtcgtatctgaaaaacaaaacggagaatccgtctggtaccaaattcaagtgaaagatgagctgatcggctgggttgaccaaaccgccgtccagttaagtgaagaaacataagcatcaaaaaaagccggcagcccgccggcttttttacattccttcagtttcaaaccttttaatatcacgtttatgccccatcagcacaagacagtcacattcatgaatgacagtctccggagaaggggacagctgaatgtctccattatgtttcaaggcgagaatggtgcagccgaatctggcccggacgccgagatcaagaatggattttaaatgcagcttttttgtggctgaaagctccacaatgctgtattcatctgacaaatcaatgtaatttaagacattttcatccgaaaggctttgcgcaatccgcacgcccatatccttttcgggatggataatacgatcagcgccgatcttttcaagcactttgtgatgataatagttttgcgctttcacccaaatattagggatgttcagctccttcaataacagcgtcgtcagcgtgcttgcctgaatgttggcgccgattgctacgatgacatattcaaaatttctgatgccgagcgactgaagctcgctttcttccgttgaatttgcccgcacagcatgcgtggcataagaggagtatgcgttgacccgctcttcgctgatatcgaccgcaagcacctcatgccccattttaaaaagctctttacagatgcttccgccgaaacggccgagtccgatgacggcaaattgtttatttttgatttttcccaatcctcataactccttaagaaactgttttcgtcactccaaatacaacaaacaagaatgtactcctgtttcaagggtttgtcaatgcgagagccggaagaaagaaaacagcacaaaaaaagaccggctgacaagcgatgggcttgtgccggtctttttttcgcaattatttgcagttgcaaggctgtgtcggcggtgtgctgcgtttttgaacaacaattgtgtcctcagcatagaatttagaaccgatgcttaatgatttattttctgcacggaacttatatgtacctgcagcaggcaacgttttgttattaagagaaagcttaaattccgctgcgccgagcaaatcaatgtttaacggaagtctgactgttttgccgttattcagaatctgtctttcacgcaaagcgtgtccgttgactgtatcttttgttgtagccgcaaatccgctaggaagggtaaattccataacgcctaagctcaggatcgtgttcggacggtacgtcaattcgatatcagaaaatgaccattcctgctggctggcacctgtatattttgcaaataaggtagcagtcgctttcgtggacatttccggctcgtgaacggttgagcctgactcagcggcgaatgacgctgtcggcagagaaagaagcaaaaccaggccgaataaacttgccatgacagttgagaaaaatttctgtttcattttcataaatccccctaaaaaaaatttgctgatgttcttaaaaaagaacgaccatacctataaaaatttaccatcaattttaatggaagtaaatggggttatgttcctatattttctcaaaaataatcaaatcacgacaaaaaaacgcctgatttttgattcaggcgtttttttcgtccgtttctatcggaataaatttaaaaatctccccgctctgaaccgagtcggcgagccgcttcagccaatgataataagctttcgagctttcaagctgatcatataactgccgcgcttcttcctgtaattccgccttgccttcctcggccagcaaaacggactgcaaatccgcctgagcctgttcaatggcggacaaattcacctgaacttcacgatcccatttcggcgggaagaaattcgtgaaaaacgtaaagaaatctttttccgctacaaacgtatgcttccgtgtgccgcggtgaaaggtttttttgaccacatttaaatcctgcagctttttgacgcctgtgctcatactcggtttgctcatctgcagttcctcacgcatttcgtcaagcgtcatttcatccctcatatacattgttccgtataaaatcccgacactccgtgtgattccgtaaagatccatcgtctctgcaatggaatcaatgacaagatccctggcttgttctatagctgcgaattctggattctcatccatactgtccctcttttccacttgaagtttaaatttgttaagtcatttctttatgttcttaatcttaacgaatcatgacaaaatgtcaaaatctaaacggactgaccgggttttgacaggcaaaaaaacatatgttaaattaatattgttaaaaacattaaatttttatttaacaaacttactttttggtaaggaggccttttatgagcaaaacgctttatatcggcggcgaatggatcagtgcagaaaaaaaacagacccgccgtatcattaatccatttaatcaagaagaaattgcaacagtatgcgaaggagaccgggacgatgcggtgaaagccatcgccgcagccagaaaagcatttgatgaaggggagtggccggtgctttccgggctcgagcgcggacaatttgttctgaaaattgcggaattaatcagacgcgatctgaacgaattagctgagctggaatcgctcgatacaggaaaaacgattgaagaaagtaaagccgatatggatgatatcgcaaatgtttttcaatattatgccggtttggcggataaagacggaggcgaggtcatttcatctccgattcccgattccgtaagtaaaatcgtcagagagcccattggcgtatgcggacaaattacgccgtggaactatccgctccttcaggcgagctggaaaatcgctcccgctcttgcggccggaaacacgatcgttttaaagccgagcgagattactccgctgacaaccattaaagtctttcaattaatagaagaagccggtattccgaaaggggtcgccaatctcgtcctggggccgggcgcctctgtcggcgacgaactggcgagaaacctcgacgtcgatttggtctcttttacgggcggaattgaaacaggcaaaaaaatcatgcaggcggcaagcggcaatgtgaaaaagattgccctggagcttggcggcaaaaatccgaatatcgtatttcaagatgcagatctcgaaacagctgcagatcaagcgctgaacgccgtgtttttccatgccggccaagtttgttcggcagggtcccgtcttttggtggacgaagccattcatgatgaatttttagccgagctgatcaagcgcacgaaacgcatcaaattaggaaatggttttcatgaagatacggaaagcggtccgctgatttccgccgagcatcgggccaaagtcgaaaaatacgtagaaatcggtatcgaagaaggggcaaaactggaaacaggcggcaaacgtcctgatgatcccgcccttcaaaacggtttcttctatgaacctactattttctcaaactgcaagtctgatatgcggatagtccaagaggagatcttcggccccgttttaacagttgagtcattttcttctgaagaagaagtgatcagacttgccaacgataccatttacgggctggccggagcggtatggtcaaaggatattgaaaaatgcgaacgcgtagccgccaaactgcggatgggaacggtatggatcaatgatttccacccgtatttcgcgcaagcgccatggggcgggtacaaacaatcgggcttcggccgcgaactcggcaaaatcggtctggaagaatacacggaaatcaaacatatttaccgcaacacgaaacctgcggctgtgaactggtttcaagcataacgaggaggagatacaatatgacattaaatatgaaagtagaaagcatgcataaattccatacattcgaaatcccgacagtcattaaacacggaatcggcgcgattcagcacgcgggaagtgaagtcagagcgcttggcgtcacaaaagcgctgctcgtaacagacccgggaatttataacgcgggagtggcaaacccggtcattgaatctttgcaggaagcgggcatcgaagtcgtcctgtttaacaaagtggagccgaacccgcctgtacgtcttgtaaacgaaggatcagaactgtataaaaaagaaaactgcaacggccttgtggctgtcggcggcggaagctccatggatacagcgaaagcgatcggagtagaagcgacacacgaaggaagcgtgcttgattatgaagccgcggaaggcaaaaagccgctggaaaaccgtattcctccgctgacaacgatcccgacgactgcgggaacaggttcagaggtcacacaatgggcggtcattacagatgaagaaagagaatttaaattcaatacgggcggaccgcttatcgccgcgcatttaacggtcattgaccctgagctgcacacgtccatgcctccgcatgtgacggccatgacaggtattgacgcccttgcgcacgccatcgagtgctatacgatgaaatttgcgcagccgatcactgatgccgtcgctttaatggccattgaatatgcggcgcattatattaagcgcgcgtttgcggacggagaggatttggaagcaagatacggcatggcgcaggcggcgatgcttgccggcctttcatacggcagtgaatcagcaggcgcggcgcatgcgatgagccagacgctcggcggcatcatccctgtcgctcacggacaatgcgtcgcagctatgatggggccggtaatggaatacaactggaaaggctatccggaaaaattcgcccgcatcgccaaagcattcggaatcgatacaagcaacatgacaaccgaagaagcggcaaaagcgtccgtcaactggatgtatgatcttgtaaaagatttagaggtaccgagtttagaagaacaaggtgtgtctccggacatgattgaacgtttatcaaaagaagctatgaaagatccgcaaacttttggaaatccaagagatttgaatgagaaagcatacaactggatttacaaacgctgcttcgacttaacgccgaaaacggtataataaatgaaccccgctcctttacagagcggggttttttaaggataatgtcaagaaaaaggcggtggtggctgatgtggaaacgcataacagcaaagacggaaggcgtatatatagcggataccgaacaatttgttaccaaaaagatggacaagcttcgtgcggaatacggcgggtttcccggtgacctgcatttcggactgacaaaaaaggccggcgcgcgtgagccgatgtatgaaagaggaacagaaatttttaaccggagacaaatttcaatcgtgtccatggaggaatgtgatgacattgccgagaagatggggatttctcatatctttcccgaatggctcggcgctaatatcgcaatcagcggtttttctgcactgacgccgcttaaagaaggaagcagaatgatatttccaagcggtgcgtctctgttgtgcgagggagaaaatgatccgtgcattcagccgggagaagtcattcaatccttttatccggatcagccaaaactcgccgcggcgtttgtgaggcacgcgatgggcagaagaggaattgtctgtattgttgaacgcccgggtgatatatgcacgggagatgcggtcaccatccattcttatgaaccgaaacgcgccaagaaaaaaatcgagaaggtctgactcagaccttctcgattttttgtttgatttcttttatttgattaatgtgacgcttttcatgatggccgataaaatcaatccactggcggatcgtcagttcttgaaaaacaggatgcggaagcacacgttctaagtcttcctcgtttaatgatgaaatgacggcggtcagctgctgtcttgccgtatctaattcctgttttgcttcaatgactgatattcggttttgctcaggttcgaggtgtgacggagccggccgtttatttgttctgtcctctataaactccatcggttgttcttctatttcttttaacggtgcgtcttttgcctgctttgataaaagggtctgcgctgtttcgtcaattttctttaaatggtcaaggacttcccgcacgctccactcatcagccgcgggctttcggttgaattcctcatcagagagtcctttcagttcttcccaggtctgctgtcttgcttcattaaaaatgctcatcctatctcctcctttagagtaaacatatcatatccggattggataatcatgtaatcagccttccttatcagaaaattgaaaccatttacctttacatccgtatataaagtaacactccgacacctcagccgaaaggaggatagaatgtggacatatttcatctgccgcttgaaacggtctatctttacacattgattatttcgggaagtctcacgcttttgattctgttttttcaagatgtgtttcacggcctctcggaagccattcctgtttcatttttaaaccctgcattgattctgtcttttttaacaatcttttcagcctcaggttatatcggcgaaatcgccgctccgctatcaagtcctgtcattgcgttgctttcatttgttctttcggttcttttggtcagcctgcttcacttcttcgtccttgtcccgctttcatcagcggaagaatcgctcgcttatcgggagacagatttaaagggcagagtcggcagggtcattacttccgtcccgaaagacggctatggagaagtgatcatagagggaatagggggcgccatttctaaatcagccgtcagctttgatcaagaacagatcaagtacggaacggccgtattagtgattgatgtaaaagacggagtgctttttgtgacgccgcatgaaccaatctgatatctaagggggaactgttatgactatgccgattatcatcgttatcggaatcgtattctttttactcatcgcacttattgctgtatttattacgaagtaccggacggcggggccggacgaagctcttatcgtgaccggaagttatttgggaaataagaacgttcacattgatgaaggcggaaatcgtctgaaaatcgtccggggcgggggaacgttcgtgctcccggtattccagcaggcagaacctctcagtttactgtcaagcaaacttgatgtctctacacctgaagtctatacagaacaaggcgtgccggtaatggccgacggaaccgccattattaaaatcggaggctccatcggtgaaatcgcaacagcagctgaacaatttttggggaaatctaaggaagaccgtgagcaggaggcgcgggaggtgctggaaggccatctgcgctccatcctcggctccatgaccgttgaagagatttataaaaacagggaaaagttttctcaggaagtccagcgggtcgcgtctcaggatcttgctaaaatggggctgatgatcgtttcttttacgattaaagacgtccgagataaaaacggctatcttgaatcattaggtaagccgagaatcgcccaagtcaagcgggatgcggacattgccacggcagaagcggataaagagacgaggattaaacgcgcggccgctgataaagacgcaaaaaaatcagagctggagcgggcgacggaaatagctgaagcggaaaaaatcaatcagctgaaaatggcggaatacagaagagagcaggatacagcaaaagccaatgccgaccaggcatatgatcttgaaacagcaaaagcccgccagcaggtgacagagcaggaaatgcaaattaaaattattgagcggcaaaagcagattgaattggaggaaaaagaaattctgcgccgtgagcgccaatatgactctgaagtgaagaaaaaagccgatgctgaccgttactcggtggaacaagcggccgcggccgcaaaagcgaagcagctcgccgaagcagatgccgagcagtacagtatcgaagcgatggccaaggcggaagcggaacgcgtgagaattgacggtcttgctaaagcggaggctgaaaaggcgagaggggaaaccgaagcggaagtcatccgcctgaaaggactcgcagaagcggaagctaaagaaaaaatcgccgaagcattcgaaaaatacgggcaggctgcaatccttgatatgattgtgaaaatgctgcctgaatatgcgaagcaagtctcagcgcctctttccaacattgataaaataaccgtcgttgatacgggaggaagcggtgaaaacggcggggccaataaagtcacaggctacgcgaccaatttaatggccggtcttcaggaaagcttaaaagcatcttccggaatcaatgtaaaagagcttattgagaatttttcaggcaaaggaaacataaaacaaagtataaatgaacttacaaaagaactgagtgattcaaacgaacggcacagcccggaataaaaaaacagcaggcgtaaaccgcctgctgtttcagttcgtccgcttagcttcaagaagccgcggcgcagtcatgaataataagataaggacaacggccgaaaggataaaagaaggaatcatataagtcgcgttatagacggacgaataaacccataccggcgtgcctttcggagcatagcttccgaaaaagacagctccggagaccacatgtgccgcatagcgcagcacactgccgatgaaaacaccgcctataacatacatcgttaaagcgcctctttttttattcaatgccgattcccgtacaccggaagcaaacaagccgctgaaaccgaggactgcaaatgccgcgatgtaatcaagaaatagctgcaccgggtgctgcaaaaacaaattgccgatggcgatctggacaatccctgttaaaaagcctgtcgtaagcccggccttcactccccagcggaatgaaatcaaaaaaatcggaatcatcataatagagaccgaaccgccttggggcatccggagaaacatgcctgagacaatgtccagaatgacagccgccccggtcataatcgctatttcaattaagcgcacaagctgtgttgaatgattcatagttttccccctggtcagacaaccgtatcaaggataaacaaaaaagcagcgcggggaaggatgggaaaagctccgcgcgctgcttacataaactgcaaatcatttggctttgccacatccctacgccagcgttaactaacaggttcaaagggtcagaacaaaatgttcactctcagctttaatgctccccttgtggtcatcaagtatttagttcaatcttactatacaagaaaatatgccaaaccacaagacagcttgcctttctatagaagagaaactgaaataagtatgaaagaaaataatcaatgattttttttaaaaaactattgtcatattttcaaaagggtgttatattattaaacgtcgctgatgaacagcagacaacaacgaaaagcttcggaaacaacttgaaaaaagttgttgacataaaagaagctgagtggtaagataataaagctgcttcaacaagcggtaatgatctttgaaaactaaacaagacaaaacgtacctgttaattcaaagttttaaataaatcgcacagcgatgtgcgtagtc

(The sequence listing continues in the following parts.)

1. A Bacillus velezensis strain with the deposit with number CECT30902 received on 12 Jul. 2023 at the Spanish Type Culture Collection (CECT).

2. A Bacillus velezensis strain wherein the Bacillus velezensis strain comprises the following genes SEQ ID No. 49 to SEQ ID No. 68.

3. A Bacillus velezensis strain with a genome comprising the sequence of SEQ ID No. 30 to SEQ ID No. 48.

4. (canceled)

5. The Bacillus velezensis strain of claim 1, wherein the strain controls plant or fruit diseases.

6. (canceled)

7. The Bacillus velezensis strain of claim 5, wherein the disease is a fungal and/or a bacterial infection.

8. The Bacillus velezensis strain of claim 7, wherein the bacterial infection is cause by a gram-negative bacteria.

9. The Bacillus velezensis strain of claim 5, wherein the plant is a woody plant.

10. The Bacillus velezensis strain of claim 7, wherein the infection is caused by an Erwinia bacterial strain.

11. The Bacillus velezensis strain of claim 5, wherein the plant is rice.

12. The Bacillus velezensis strain of claim 5, wherein the disease is a rice blast.

13. The Bacillus velezensis strain of claim 5, wherein the disease is caused by a M. orzyae infection.

14. A composition for plant protection comprising an effective amount of the Bacillus velezensis strain of claim 1, and a suitable additive.

15. The composition of claim 14, wherein the suitable additive is selected from a list consisting of: a carrier, a solvent, a buffer, a stabiliser; a preservative, an excipient, a surfactant, an adhesion agent, an emulsifier, osmoprotectant, sun protectant, wetting agent, and mixtures thereof.

16. The composition of claim 15, wherein the carrier is alginate, chitosan, ulvan, fucoidan, carrageenan, xanthan gum, gellan gum, gelatin, arabic gum, lignin, maltodextrin, zein, protamine sulphate, lecithin, gelatin matrices, methacrylate-modified lignin, methacrylated gellan gum, polyvinyl alcohol, low density polyethylene, poly(ε-caprolactone), polyethylene glycol or poly(lactic-co-glycolic acid), or combinations thereof.

17. The composition of claim 14, further comprising an agriculturally acceptable compound, wherein the agriculturally acceptable compound is selected from: plant strengtheners, growth promoters, nutrients, fertilisers, vitamins, minerals, and mixtures thereof.

18. The composition of claim 14, further comprising a biological plant protector agent.

19. The composition of claim 14, whereein the effective amount of B. velezensis strain in the composition ranges from 1.0×10³ CFU/mL to 1.0×10¹¹ CFU/mL.

20. The composition of claim 14, wherein the composition is in the form of wettable powders, granules, flowables, microencapsulations or nanoencapsulations.

21. (canceled)

22. (canceled)

23. The composition of claim 14, wherein the composition is a biological plant protection agent.

24. A method for protecting or treating plants and/or fruit from fungal or bacterial infections comprising applying an effective amount of the Bacillus velezensis strain of claim 1.
